(19) United States
(12) Patent Application Publication
(10) Pub. No.: US 2022/0288226 A1
(43) Pub. Date: Sep. 15, 2022

(54) METHODS AND COMPOSITIONS TO TREAT AUTOIMMUNE DISEASES AND CANCER

(71) Applicant: ENOSI LIFE SCIENCES CORP., Eugene, OR (US)

(72) Inventor: H. Michael SHEPARD, Springfield, OR (US)

(21) Appl. No.: 17/731,595

(22) Filed: Apr. 28, 2022

Related U.S. Application Data
(63) Continuation-in-part of application No. PCT/US21/48074, filed on Aug. 27, 2021.
(60) Provisional application No. 63/071,313, filed on Aug. 27, 2020.

(30) Foreign Application Priority Data
Mar. 3, 2022 (TW) 111107730

(51) Int. Cl. A61K 47/68

(52) U.S. Cl. CPC A61K 47/6849; A61K 47/6889; A61K 47/6811; A61K 47/6813

(57) ABSTRACT

Provided are molecular constructs that target tumor necrosis factor receptor 1 (TNFR1) and/or tumor necrosis factor receptor 2 (TNFR2). The constructs are for treating diseases, disorders, and conditions in which these receptors and/or TNF are involved in the etiology or in which their inhibition or activation thereof can ameliorate the disease, disorder, and condition or a symptom thereof. Among the constructs provided herein, are TNFR1 antagonist constructs that are engineered to inhibit TNFR1 function, and to eliminate any TNFR1 agonist activity. The constructs provided herein include agonists and antagonists of TNFR1 and TNFR2 Included also are agonists and antagonists of TNFR2. Agonists of TNFR2 increase regulatory T-cell function to control acute or chronic inflammation. Antagonists of TNFR2 decrease regulatory T-cell function thus increasing immunity, and are for treating cancer and certain immunodeficiency diseases. Methods of treatment of the various diseases in which TNF and its receptors play a role also are provided. Also provided are growth factor ligand trap constructs, and methods of use thereof for treatment of diseases, disorders, and conditions, including cancer.

### RELATED APPLICATIONS

[0001] This application is a continuation-in-part of International PCT application No. PCT/US2021/048074, filed Aug. 27, 2021, to inventor H. Michael Shepard, and Applicant Enosi Life Sciences Corp., entitled “METHODS AND COMPOSITIONS TO TREAT AUTOIMMUNE DISEASES AND CANCER,” which claims the benefit of priority to U.S. Provisional Application Ser. No. 63/071,313, filed Aug. 27, 2020, entitled “METHODS AND COMPOSITIONS TO TREAT AUTOIMMUNE DISEASES AND CANCER” to inventor H. Michael Shepard, and Applicant Enosi Life Sciences Corp.

[0002] Benefit of priority is claimed to U.S. Provisional Application Ser. No. 63/071,313, filed Aug. 27, 2020, entitled “METHODS AND COMPOSITIONS TO TREAT AUTOIMMUNE DISEASES AND CANCER” to inventor H. Michael Shepard, and Applicant Enosi Life Sciences Corp.

[0003] Benefit of priority also is claimed to TW patent application no. 111107730, filed on Mar. 3, 2022, to inventor H. Michael Shepard, and Applicant Enosi Life Sciences Corp., entitled “METHODS AND COMPOSITIONS TO TREAT AUTOIMMUNE DISEASES AND CANCER.”

[0004] This application is related to International PCT application No. PCT/US2020/018739, filed Feb. 19, 2020, published on Aug. 27, 2020, as International PCT Publication No. WO 2020/172218, to inventor H. Michael Shepard, and Applicant Enosi Life Sciences Corp., entitled “ANTIBODIES AND ENONOMERS.” This application also is related to the U.S. application Ser. No. 17/432,720, filed Aug. 20, 2021, which is the U.S. National Stage Application of PCT/US2020/018739, filed Feb. 19, 2020, which claims the benefit of priority to U.S. Provisional Application Ser. No. 62/808,635, filed Feb. 21, 2019.

[0005] The subject matter of each of these applications is incorporated by reference in its entirety.

### INCORPORATION BY REFERENCE OF SEQUENCE LISTING PROVIDED ELECTRONICALLY

[0006] An electronic version of the Sequence Listing is filed herewith, the contents of which are incorporated by reference in their entirety. The electronic file was created on Apr. 27, 2022, is 1,629 kilobytes in size, and is titled 5301SEQ001.txt.

### FIELD

[0007] This application is directed to nucleic acid constructs and encoded products for use as anti-TNF therapies. The treated diseases are those in which TNF receptors and/or TNF or the TNF/TNF receptor(s) pathways is involved or plays a role in the etiology thereof.

### BACKGROUND

[0008] Anti-TNF therapies/TNF-blockers (a type of biological Disease Modifying Anti-Rheumatic Drugs; DMARDs) typically are prescribed after the failure of conventional DMARDs. These therapies include monoclonal antibodies (mAbs), such as the chimeric mAb infliximab (Remicade®); containing a murine variable region and a human IgG1 constant region, and the fully humanized mAbs (IgG1s) adalimumab (sold, for example under the trademark Humira®), and golimumab (Simponi® antibody); the PEGylated humanized Fab′ fragment of a mAb targeting TNF, certolizumab pegol (Cimzia® antibody); and TNFR2 fusion proteins, such as the TNFR2-Fc fusion protein etanercept (sold under the trademark Enbrel®), which contains the extracellular receptor region that contains the binding site of human TNFR2 fused to the Fc of human IgG1. The drugs sold under the trademarks Remsima® and Inflectra® are biosimilars of infliximab that are approved for use in the European Union for the treatment of various autoimmune and chronic inflammatory diseases and disorders. These TNF inhibitors, which sequester TNF, are used for the treatment of various diseases and conditions, including, for example, RA, psoriasis, psoriatic arthritis, ankylosing spondylitis, juvenile idiopathic arthritis (JIA), and/or inflammatory bowel disease (IBD; such as, Crohn's disease and ulcerative colitis).

[0009] Such therapies, however, are associated with severe side effects, including, for example, an increased risk of sepsis and serious infections, such as listeriosis, reactivation of tuberculosis, reactivation of hepatitis B/C, reactivation of herpes zoster, and invasive fungal and other opportunistic infections, including reactivation of M. tuberculosis infection. These therapies have been shown to induce macrophage apoptosis in the rheumatoid synovium. Infliximab is associated with increased apoptosis in the inflammatory cell infiltrate in the guts of patients with Crohn's disease. Other anti-rheumatic drugs, such as methotrexate and glucocorticoids, also can induce apoptosis in immune cells (see, e.g., Vigna-Pérez et al. (2005) Clin. Exp. Immunol. 141(2):372-380). These therapeutic agents also can cause worsening of severe congestive heart failure, drug-induced lupus, and demyelinating central nervous system (CNS) diseases, as well as lymphomas and non-melanoma skin cancers (see, e.g., Benjamin et al. Disease Modifying Anti-Rheumatic Drugs (DMARDs) [Updated 2020 Feb. 27]. In: StatPearls [Internet]. Treasure Island (FL): StatPearls Publishing; 2020 January Available from: (ncbi.nlm.nih.gov/books/NBK507863/)). Other adverse side effects include liver injury, demyelinating disease/CNS disorders, lupus, psoriasis, sarcoidosis, and an increased susceptibility to the development of additional autoimmune diseases, as well as cancers, including lymphomas and solid malignancies (see, e.g., Dong et al. (2016) Proc. Natl. Acad. Sci. U.S.A. 113(43):12304-12309; Zalevsky et al. (2007) J. Immunol. 179:1872-1883; Zoran et al. (2019) Sci. Rep. 9:17231). Thus, the uses of these therapeutic agents, particularly for chronic diseases/conditions that require long-term administration, such as arthritis and inflammatory bowel disease (IBD, are limited. Approximately 30% of RA patients are non-responsive, or therapeutic benefits are not sustained, with the use of anti-TNF therapies (see, e.g., McCann et al. (2014) Arthritis & Rheumatology 66(10):2728-2738). Non-responsiveness also occurs in non-RA patients receiving anti-TNF therapeutics. Depending on the anti-TNF agent, 13-33% of treated patients do not respond to treatment, and up to 46% stop responding, resulting in discontinuation or dose increase (see, e.g., Richter et al. (2019) MABS 11(4):653-665). Thus, there is a need for therapies with improved therapeutic efficacy and safety.

### SUMMARY

[0010] Provided are molecular constructs, and nucleic acids encoding them, that target tumor necrosis factor receptor 1 (TNFR1) and/or tumor necrosis factor receptor 2 (TNFR2). The constructs are for treating diseases, disorders, and conditions in which these receptors and/or TNF are involved in the etiology or in which their inhibition or activation can ameliorate the disease, disorder, and/or condition or a symptom thereof. The constructs provided herein include agonists and antagonists of TNFR1 and TNFR2. TNFR1 antagonist constructs are engineered to inhibit TNFR1 function, and to avoid TNFR1 agonist activity. Also included are agonists and antagonists of TNFR2. Agonists of TNFR2 increase regulatory T-cell function to control acute or chronic inflammation. Antagonists of TNFR2 decrease regulatory T-cell function thus increasing immunity, and are for treating cancer and certain immunodeficiency diseases.

[0011] Cells have two TNF receptors: TNFR1 and TNFR2. These pathways balance one another in normal physiology. TNF/TNFR1 drives inflammation, while TNF/TNFR2 is anti-inflammatory. TNFR2 generally is activated later than TNFR1, and so does not immediately impact useful TNF-induced inflammation but activates later to suppress over activation of inflammatory pathways. Simultaneous inhibition of both pathways removes the inflammation-dampening effect of TNFR2. Existing TNF blockers limit their own efficacy because the Treg generator (TNFR2), which is anti-inflammatory, is turned down/off.

[0012] The constructs provided herein, among other properties that differ from prior therapeutics that target TNF/TNFRs, inhibit TNFR1 signaling or activity without compromising the ability of a treated subject to fight opportunistic infections. Among the constructs provided herein is one type that is a modified single chain antibody that specifically targets and inhibits TNFR1, but does not antagonize TNFR2, thereby preventing transient activation of TNFR1 via receptor clustering. Constructs provided herein silence the TNF inflammatory pathway mediated by TNFR1, but retain, and in some embodiments enhance, the healing pathway of TNFR2. These constructs can be administered to treat indications where TNF blockers have failed. Among the constructs provided herein are constructs that specifically inhibit tumor necrosis factor receptor type 1; provided are methods and uses of the constructs for treating diseases, disorders, and conditions in which TNF or receptors therefor play a role in the etiology or in the symptoms.

[0013] Existing anti-TNF drugs block overzealous inflammation, which occurs in autoimmune diseases, including rheumatoid arthritis, polyarticular juvenile idiopathic arthritis, axial spondyloarthritis, ankylosing spondylitis, psoriatic arthritis, psoriasis, Crohn's disease, pediatric Crohn's disease, and ulcerative colitis. The constructs herein can be used to treat the same diseases, but avoid the deleterious or adverse side effects. Constructs provided herein are more effective at suppressing inflammatory cytokines in vivo than prior therapeutics such as the TNFR2-Fc fusion protein etanercept (sold under the trademark Enbrel®), and preserve regulatory T-cell function. The constructs can include activity modifiers or property modifiers to increase serum half-life, and have demonstrated activity in blocking TNFR1 signaling, such as in TNF assays that compare activity with adalimumab and/or etanercept.

[0014] As established in mouse models, the constructs preserve macrophage function better than adalimumab, showing they do not lead to opportunistic infections; they also preserve Treg function substantially better than adalimumab or etanercept, and are as therapeutically effective in treating diseases, disorders, and conditions, such as rheumatoid arthritis. In some embodiments, the Kd is ≤1 nM, and the t_{1/2} in vivo is about 10-12 days. The constructs can be administered by any suitable route for the particular indication. Routes include, but are not limited to, subcutaneously, intravenously, intratumorally, intra-hepatically, topically, mucosally, intradermally, and any other suitable route.

[0015] Among the constructs provided herein are the following. Provided are constructs that are a tumor necrosis factor receptor 1 (TNFR1) antagonist construct of formula 1: (TNFR1 inhibitor)ₙ-linkerₚ-(activity modifier)_{q}, wherein: each of n and q is an integer, and each is independently 1, 2, or 3; p is 0, 1, 2 or 3; a TNFR1 inhibitor is a molecule that binds TNFR1 to inhibit (antagonize) activity of TNFR1; an activity modifier is a moiety that modulates or alters the activity or a pharmacological property of the construct compared to the construct in the absence of the activity modifier; and linkers increases flexibility of the construct, and/or moderates or reduces steric effects of the construct or its interaction with a receptor, and/or increases solubility in aqueous media of the construct. Linkers can contain a plurality of components. Linkers include chemical linkers, polypeptide linkers, and combinations thereof. The constructs can be linked via chemical and/or physical bonds. The constructs can be fusion proteins.

[0016] The TNFR1 inhibitor can comprise a domain antibody (dAb) or a single chain antibody. The construct includes those in which the TNFR1 inhibitor is a domain antibody (dAb), the activity modifier is not an unmodified single Fc region or a human serum albumin antibody. For example, the activity modifier (or property modifier) is a modified Fc region or is human serum albumin. In the constructs, the TNFR1 inhibitor can be one that inhibits TNFR1 signaling, and/or the activity modifier increases serum half-life of the construct. For example, the constructs include those in which the activity modifier is albumin or an Fc that is modified to have reduced or no ADCC (antibody dependent cellular cytotoxicity) activity and/or reduced or no CDC (complement-dependent cytotoxicity) activity. The TNFR1 inhibitor can be one that inhibits a TNFR1 activity, but does not antagonize tumor necrosis factor receptor 2 (TNFR2) activity. The TNFR1 inhibitor can be one that inhibits TNFR1 signaling.

[0017] Also provided are multi-specific constructs. For example, provided are multi-specific constructs, comprising a TNFR1 inhibitor and a Treg expander, wherein a bi-specific construct interacts with two different target receptors or antigens or epitopes on a receptor. Among the multi-specific constructs are those that are bi-specific for TNFR1 and a Treg expander. The Treg expander can be a TNFR2 agonist.

[0018] The constructs can comprise a linker to provide flexibility, increase solubility, and/or to relieve and/or reduce steric hindrance and/or Van der Waals interactions. The constructs, optionally, but generally comprise an activity modifier to alter or modulate the activity or a property of the construct. Provided are constructs that have Formula 2: (TNFR1 inhibitor)ₙ-(activity modifier)ᵣ₁-(Linker (L))ₚ-(activity modifier)ᵣ₂-(TNFR2 agonist)_{q}, or (TNFR1 inhibitor)ₙ-(activity modifier)ᵣ₁-(Linker (L))ₚ-(activity modifier)ᵣ₂-(Treg expander)_{q}, where: n=1, 2, or 3, p=1, 2, or 3, q=0, 1 or 2, and each of r1 and r2 is independently 0, 1, or 2; and the components can be in the order specified or any other order as long as the construct interacts with TNFR1 and TNFR2 to antagonize TNFR1 and agonize TNFR2, or has Treg expander activity. For example, included are constructs, among any of those provided herein, where the TNFR1 inhibitor moiety inhibits binding of TNFα binding to TNFR1 and/or inhibits signaling.

[0019] Also provided are constructs of formula 3a or 3b: (TNFR2 agonist or Treg expander)ₙ-linkerₚ-(activity modifier)_{q}, formula 3a, or (activity modifier)_{q}-linkerₚ-(TNFR2 agonist or Treg expander)ₙ, formula 3b, where: each of n and q is an integer, and each is independently 1, 2, or 3; p is 0, 1, 2 or 3; an activity modifier is a moiety that alters a pharmacological property or an activity of the construct; a TNFR2 agonist interacts with TNFR2 resulting in TNFR2 activity; a Treg expander, includes TNFR2 agonists, and is a molecule that results in increased Treg cells; and a linker increases flexibility and/or moderates or reduces steric effects of the construct or its interaction with a receptor; and/or alters solubility of the construct. In some embodiments, the activity modifier is an Fc region or a modified Fc region or a short FcRnBP; and the linker comprise a hinge region, or is a linker comprising G and S residues. Exemplary of linkers are those that increase serum half-life of the construct. For example, the linker can have a sequence set forth in any of SEQ ID NOs: 812-834 or is a PEG moiety linker. In some embodiments, the construct comprises an activity modifier that is a modified Fc region or a peptide that increases serum half-life of the construct. The Fc region can be an Fc dimer; the Fc region can be modified to have reduced ADCC and/or CDC activity, such as an Fc modified to have reduced or no ADCC activity.

[0020] Included among the constructs provided herein are those in which the TNFR1 inhibitor is any as defined in the sequence listing, listed below, or known in the art; the Treg expander is any known in the art, a TNFR2 agonist, or any Treg expander set forth in the sequence listing, or known in the art; the linker is any listed in the sequence listing or below or known in the art; and the activity modifier is any set forth in the sequence listing, known in the art, and/or set forth below.

[0021] Provided are constructs that are TNFR1 antagonist constructs, comprising a TNFR1 inhibitor that is a single chain antibody or antigen-binding portion thereof that specifically targets and inhibits TNFR1, but does not antagonize TNFR2, thereby preventing transient activation of TNFR1 via receptor clustering. In such constructs that comprise an antibody or antigen-binding portion thereof, the antibody or antigen-binding fragment thereof can contain a modification that improves a pharmacological property and/or structure of the construct.

[0022] In any of the constructs provided herein, the constructs include component(s) that agonize(s) TNFR2 signaling to thereby increase expression of regulatory T cells (Tregs), thereby providing TNFR1 antagonism and concomitant (or substantially concomitant) increase in expression of Tregs. In the constructs provided herein, the TNFR1 inhibitor can be a single chain antibody that inhibits TNFR1 by inhibiting TNFR1 signaling, such as, for example, where the antibody portion or antigen binding portion of the construct inhibits binding of TNFα binding to TNFR1. Among the constructs are those where the TNFR1 inhibitor is an antibody or antigen binding portion that does not inhibit binding of TNFα to TNFR1, but does inhibit TNFR1 signaling. The property or activity that can be modulated/altered can be serum half-life.

[0023] The constructs can comprise an Fc modified to eliminate ADCC and/or CDC activity. The construct can comprise an Fc dimer, such as one in which one Fc monomer comprises holes, and the other comprises knobs, to form a heterodimer. For example the knob mutation(s) is/are selected from among S354C, T366Y, T366W, and T394W by EU numbering; and the hole mutation(s) is/are selected from among Y349C, T366S, L368A, F405A, Y407T, Y407A, and Y407V by EU numbering, whereby the Fc monomers form the heterodimer. In some embodiments where the construct comprises an Fc, the Fc is from trastuzumab. The construct can be dimerized by fusion of the N-terminus with the C-terminus of trastuzumab.

[0024] In some embodiments in which the constructs comprise a linker the linker is or comprises a hinge region from an Fc region. For example, in which the hinge region is from trastuzumab, and it is linked to the Fc region. The constructs include those that comprise a linker that is linked to the anti-TNFR1 antagonist antibody or antigen-binding portion thereof. The linker can be linked to the anti-TNFR1 antagonist antibody or antigen-binding portion thereof, and directly or via a hinge region to an Fc region. The Fc region or modified Fc region, for example, comprises the sequence of amino acids set forth in any of SEQ ID NOs:10, 12, 14, 16, 27, 30, 1469, and 1470.

[0025] Also provided are constructs that bind to neonatal Fc receptor (FcRn). For example, provided are TNFR1 constructs that comprise a short FcRn-binding peptide (FcRnBP), where a short FcRn-binding peptide (FcRnBPs) provides for the interaction of the construct with FcRn, and contains 6-25, or 10-20 amino acid residues. For example, the FcRnBP contains 12-20 residues or 15 residues or 16 residues. Exemplary of these are TNFR1 antagonist constructs where the FcRn-binding peptide (FcRnBP) comprises or consists of a peptide of any SEQ ID NOs:48-51. The constructs include TNFR1 constructs that comprise an Fc heterodimer, where one Fc monomer comprises holes, and the other comprises knobs, whereby the Fc dimer that results is a heterodimer.

[0026] Provided are constructs that are TNFR1 antagonist constructs that comprise: a TNFR1 inhibitor; an Fc dimer; and a Treg expander, where: the Fc dimer comprises two complementary Fc monomers; the TNFR1 inhibitor is linked to one of the Fc monomer, and the Treg expander is linked to the other Fc monomer. In such constructs the Treg expander can be a TNFR2 agonist. They can further comprise a second Treg expander linked to the same Fc monomer as the TNFR1 inhibitor, where the first and second Treg expanders are the same or different. The second Treg expander can be a TNFR2 agonist. In some embodiments, the Treg expanders are the same. The TNFR1 inhibitor can be one that inhibits or blocks TNFR1 signaling. In some embodiments, the TNFR1 inhibitor binds to TNFR1 and blocks or inhibits TNFα binding and TNFR1 signaling. In some embodiments, the TNFR1 inhibitor binds to TNFR1, does not or interfere with TNFα binding, and blocks or inhibits TNFR1 signaling. In some embodiments of these constructs, the Treg expander is a TNFR2 agonist. The TNFR2 agonist can be one that stimulates or induces TNFR2 signaling. Exemplary of the Treg expanders is a TNFR2 agonist that is an scFv, VHH single domain antibody, or Fab of aTNFR2 agonist monoclonal antibody. In these constructs, the Treg expander can be a TNFR2 agonist that is a small molecule, or a nucleic acid aptamer, or a peptide aptamer.

[0027] Also provided are any of these constructs that is or also is a TNFR2 agonist. The TNFR2 agonist is a construct of formula 3a or 3b, where: formula 3a is (Treg expander)ₙ-linkerₚ-(activity modifier)_{q}, and formula 3b is (activity modifier)_{q}-linkerₚ-(Treg expander)ₙ. In these formulae, each of n and q is an integer, and each is independently 1, 2, or 3; p is 0, 1, 2 or 3; an activity modifier is a moiety that modulates or alters the activity or a pharmacological property of the construct compared to the construct in the absence of the activity modifier; and the linker increases flexibility of the construct, and/or moderates or reduces steric effects of the construct or its interaction with a receptor, and/or increases solubility in aqueous media of the construct. In any of these constructs, the Treg expander in the construct is a TNFR2 agonist. For example, the TNFR2 agonist stimulates or induces TNFR2 signaling. In other examples, the Treg expander is a TNFR2 agonist that is an scFv, VHH single domain antibody, or Fab of a TNFR2 agonist monoclonal antibody. The Treg expander can be a TNFR2 agonist that is a small molecule, or a nucleic acid, or peptide aptamer. In the constructs that comprise all or a portion of trastuzumab, such as the Fc portion and/or Fc and hinge region or modified forms thereof, the construct can be dimerized by N-terminal fusion with the C-terminus of trastuzumab.

[0028] Provided are constructs that comprise a TNFR1 inhibitor moiety linked via a central PEG linker to one more Treg expanders, or that comprise at least two TNFR1 inhibitors that are the same or different, or that comprise two Treg expanders that are the same or different. The constructs that comprise a PEG moiety, such as a central PEG linker can comprise a branched PEG moiety linking the TNFR1 inhibitor and one or more Treg expanders. Exemplary are those that have a structure selected from among formulae 4A to 4D:

[chemical structure]

n is 1 to 5;
R¹ is H or CH₃, or CH₂CH₃ or other C1-C5 alkyl [symbol]
is a TNFR1 inhibitor (TNFR1 antagonist); [symbol]
is a Treg expander; or

[chemical structure]

[symbol]

is a TNFR1 inhibitor (TNFR1 antagonist) [symbol]
is a Treg expander;
n is 1 to 5; or

[chemical structure]

[symbol]

is a TNFR1 inhibitor (TNFR1 antagonist), or a Treg expander; and
n is 1 to 5; or

[chemical structure]

wherein
each [symbol] is same or different and each is independently selected from a TNFR1 inhibitor (TNFR1 antagonist), and a TNFR2 agonist;
the activity modifier is optional, and can be linked to any suitable locus in the molecule; and n is 1 to 5.

[0029] In TNFR1 antagonist constructs and other constructs provided herein, the Treg expander can be a TNFR2 agonist. These constructs can include an activity modifier, such as, for example, where the activity modifier is an Fc region, or is an Fc region that includes a hinge region or other linker; and the Fc region or Fc region with hinge region is an Fc that is modified to reduce or eliminate ADCC and/or CDC activity. Exemplary thereof are constructs where the Fc or modified Fc is an IgG Fc or is an IgG1 or IgG4 Fc, and/or are constructs that bind to neonatal Fc receptor (FcRn). Exemplary of these constructs are those where: the construct comprises a short FcRn-binding peptide (FcRnBP), where the short FcRn-binding peptide (FcRnBPs) provides for the interaction of the construct with FcRn, and contains 6-25, such as 10-20 amino acid residues; or wherein the FcRnBP contains 12-20 residues or 15 residues or 16 residues, such as, for example where the FcRn-binding peptide (FcRnBP) comprises or consists of a peptide of any SEQ ID NOs:48-51.

[0030] Also provided are TNFR1 antagonist constructs of any of the formulae above and in the application that comprise: a) a TNFR1 inhibitor moiety that is a TNFR1-selective; b) optionally, one or more linkers; and c) optionally, a half-life extending moiety, where the antagonist construct comprises at least one of b) and c). In such constructs, the TNFR1-selective antagonist selectively binds and inhibits TNFR1 signaling, but not TNFR2 signaling. As described for the constructs above, the TNFR1 inhibitor, linkers, and other components can be those as described above. These include constructs where the TNFR1 inhibitor that is a selective antagonist comprises an antigen-binding fragment that selectively binds and inhibits TNFR1 signaling but not TNFR2 signaling. For example, the antigen-binding fragment that selectively binds and inhibits TNFR1 signaling but not TNFR2 signaling can comprise a domain antibody (dAb), scFv, or Fab fragment. In any of the constructs described herein, the TNFR1 inhibitor comprises an antigen-binding fragment of a human anti-TNFR1 antagonist monoclonal antibody. For example, the human anti-TNFR1 antagonist monoclonal antibody is H398 that comprises SEQ ID NO:678, or ATROSAB, or an antigen binding portion thereof or a sequence having at least 95% sequence identity to SEQ ID NO:31 or 32 or 673 or 678 or an antigen-binding portion thereof that binds to TNFR1. Exemplary of TNFR1 inhibitors are those that comprise a domain antibody (dAb) or antigen binding portion thereof or comprises the sequence of amino acids set forth in any of SEQ ID NOs: 52-672 or a sequence having at least 95% sequence identity thereto that retains TNFR1 inhibitor activity; and/or comprise the scFv set forth in any of SEQ ID NOs:673-678 or variants of these polypeptides having at least 90% or 95% sequence identity thereto that retains TNFR1 inhibitor activity; and/or comprise the Fab set forth in any of SEQ ID NOs:679-682 or a sequence having at least 90% or 95% sequence identity thereto that retains TNFR1 inhibitor or binding activity; and/or comprises the nanobody whose sequence is set forth in SEQ ID NO: 683 or 684 or a sequence having at least 90% or 95% sequence identity thereto that retains TNFR1 inhibitor or binding activity. Among the TNFR1 inhibitors, are those, for example, that comprise a dominant-negative tumor necrosis factor (DN-TNF) or TNF mutein, such as, for example, a DN-TNF or TNF mutein is a soluble TNF molecule, comprising one or more amino acid replacements that confer selective inhibition of TNFR1 and are selected from among:

[0031] V1M, L29S, L29G, L29Y, R31C, R31E, R31N, R32Y, R32W, C69V, A84S, V85T, S86T, Y87H, Q88N, T89Q, I97T, C101A, A145R, E146R, L29S/R32W, L29S/S86T, R32W/S86T, L29S/R32W/S86T, R31N/R32T, R31E/S86T, R31N/R32T/S86T, I97T/A145R, V1M/R31C/C69V/Y87H/C101A/A145R, and A84S/V85T/S86T/Y87H/Q88N/T89Q, with reference to the sequence of soluble TNF, set forth in SEQ ID NO:2. For example, the TNFR1 inhibitor is a TNF mutein that comprises the sequence of residues set forth in any one of SEQ ID NOs:701-703, or a sequence with at least or at least about 90% or 95% sequence identity to the sequence of residues set forth in any one of SEQ ID NOs:701-703 or fragment thereof that retains TNFR1 inhibitor activity.

[0032] Any of the foregoing constructs provided herein can include a linker, where the linker comprises all or a portion of the hinge sequence of trastuzumab, SCDKTH corresponding to residues 222-227 of SEQ ID NO:26 or up to the full sequence of the hinge region of trastuzumab, that contains or has the sequence EPKSCDKTHTCPPCP (corresponding to residues 219-233 of SEQ ID NO:26), or at least 5, 6, 7, 8, 9, 10, or 11 contiguous residues thereof, or residues ESKYGPPCPPCP, corresponding to residues 212-223 of SEQ ID NO:29, or a sequence having at least 98% or 99% sequence identity thereto that is a linker. For example, the construct can comprise a linker, where the linker comprises the sequence SCDKTH, corresponding to residues 222-227 of SEQ ID NO:26. The constructs can comprise in place of or in addition to another of the linkers, a linker that comprises glycine and serine (GS) residues, a GS linker. Exemplary GS linkers for any of the constructs provided herein include those selected from among (GlySer)ₙ, where n=1-10; (GlySer₂); (Gly₄Ser)ₙ, where n=1-10; (Gly₃Ser)ₙ, where n=1-5; (SerGly₄)ₙ, where n=1-5; (GlySerSerGly)ₙ, where n=1-5; GSGGSSGG; GSSSGSGSGSSG; GSSSGSGSGSSGG; GGSSGG; GGSSGGSGGSSSG; GSSSGSGSGGSSSGSGSG; GGSSGGSSGGGSSGGSSG; and GSSSGS. Also included are linkers that comprise a GS linker and all or a portion of the hinge sequence of trastuzumab, corresponding to residues EPKSCDKTHTCPPCP (corresponding to residues 219-233 of SEQ ID NO:26), for example, the linker can comprises a GS linker and comprise or contain only the sequence SCDKTH, corresponding to residues 217-222 of SEQ ID NO:31, from the hinge sequence. Such linkers include, for example, those that comprise a GS linker and all or a portion of the hinge sequence of nivolumab, corresponding to residues 212-223 of SEQ ID NO:29.

[0033] The constructs herein can contain an activity modifier. The activity modifiers include any described herein, including those described above, and below, and others know to those of skill in the art; the activity modifier alters and activity or property of the construct. The activity modified can be one that is a half-life extending moiety that is an IgG Fc, a polyethylene glycol (PEG) molecule, or human serum albumin (HSA). Examples of IgG Fc is an IgG1 or IgG4 Fc. The IgG1 Fc can be the Fc of trastuzumab, set forth in SEQ ID NO:27 or a sequence of amino acids having at least 95% sequence identity therewith; the IgG4 Fc can be the Fc of nivolumab, set forth in SEQ ID NO:30 or a sequence of amino acids having at least 95% sequence identity therewith. For example, the IgG1 Fc is the Fc of human IgG1, set forth in SEQ ID NO:10, and the IgG4 Fc is the Fc of human IgG4, set forth in SEQ ID NO:16.

[0034] The constructs described herein include those that are TNFR1 inhibitors or comprise a TNFR1 inhibitor(s). These include constructs where the TNFR1 inhibitor is monovalent. These can include linkers, such as where the linker comprises (Gly₄Ser)₃, and/or linkers that comprise (Gly₄Ser)₃ and SCDKTH (residues 217-222 of SEQ ID NO:31); and/or linkers that comprise (Gly₄Ser)₃ and the hinge sequence of trastuzumab, corresponding to residues 219-233 of SEQ ID NO:26; and/or those that comprise (Gly₄Ser)₃ and the hinge sequence of nivolumab, corresponding to residues 212-223 of SEQ ID NO:29. Exemplary of constructs provided herein that inhibit TNFR1 are those that comprise the sequence of residues set forth in any of SEQ ID NOs:704-764, or a construct that inhibits TNFR1 and has a sequence with at least or at least about 95% sequence identity to the sequence of residues set forth in any one of SEQ ID NOs:704-764.

[0035] Provided herein are TNFR1 antagonist constructs. These include those where the TNFR1 construct comprises a short FcRn-binding peptide (FcRnBP); and the short FcRn-binding peptide (FcRnBPs) provides for the interaction of the construct with FcRn, and contains 6-25, such as 10-20 amino acid residues, such as for, example, those where the FcRnBP contains 12-20 residues or 15 residues or 16 residues, such as, for example those where the FcRn-binding peptide (FcRnBP) comprises a peptide of any SEQ ID NOs:48-51 or a peptide having at least about 95% sequence identity therewith, or an FcRn-binding peptide (FcRnBP) that consists of a peptide of any SEQ ID NOs:48-51.

[0036] Other exemplary TNFR1-inhibiting constructs provided herein include constructs that comprise: a) a domain antibody that inhibits TNFR1; b) a linker that increases flexibility; reduces steric effects, or increases solubility; and c) a half-life extending moiety. Included are such constructs where the half-life extending moiety is not a human serum albumin antibody or an unmodified Fc. These constructs include those that are a TNFR1 antagonist, comprising: a) the domain antibody (dAb) of any of SEQ ID NOs:52-672, or the scFv of any of SEQ ID NOs:673-678 or the Fab of any of SEQ ID NOs:679-682, or the nanobody of SEQ ID NO: 683 or 684, or the TNF mutein of any of SEQ ID NOs:685-703; b) a GS linker selected from among (GlySer)ₙ, where n=1-10; (GlySer₂); (Gly₄Ser)ₙ, where n=1-10; (Gly₃Ser)ₙ, where n=1-5; (SerGly₄)ₙ, where n=1-5; (GlySerSerGly)ₙ, where n=1-5; GSGGSSGG; GSSSGSGSGSSG; GSSSGSGSGSSGG; GGSSGG; GGSSGGSGGSSSG; GSSSGSGSGGSSSGSGSG; GGSSGGSSGGGSSGGSSG; and GSSSGS; and c) a half-life extending moiety that is an IgG Fc. In these constructs, or any provided herein that include one or more of these components, the GS linker can be (GGGGS)₃; and the IgG Fc can be the Fc of trastuzumab or the Fc of nivolumab.

[0037] Others of the constructs provided herein that are TNFR1 antagonist constructs include constructs comprising: a) the domain antibody (dAb) of any of SEQ ID NOs:52-672, or the scFv of any of SEQ ID NOs:673-678 or the Fab of any of SEQ ID NOs:679-682, or the nanobody of SEQ ID NO: 683 or 684, or the TNF mutein of any of SEQ ID NOs:685-703; b) a linker selected from among all or a portion of the hinge sequence of trastuzumab and all or a portion of the hinge sequence of nivolumab; and c) a half-life extending moiety that is an IgG Fc. In such constructs, the linker can comprise all or a portion of the hinge sequence of trastuzumab, where the IgG Fc is the Fc of trastuzumab. In other embodiments, the linker can comprise all or a portion of the hinge sequence of nivolumab, where the IgG Fc is the Fc of nivolumab.

[0038] Provided are any of the constructs provided herein that is a TNFR1 antagonist construct, comprising:

[0039] a) the domain antibody (dAb) of any of SEQ ID NOs:52-672, or the scFv of any of SEQ ID NOs:673-678 or the Fab of any of SEQ ID NOs:679-682, or the nanobody of SEQ ID NO: 683 or 684, or the TNF mutein of any of SEQ ID NOs:685-703;

[0040] b) a first linker that is a GS linker selected from among (GlySer)ₙ, where n=1-10; (GlySer₂); (Gly₄Ser)ₙ, where n=1-10; (Gly₃Ser)ₙ, where n=1-5; (SerGly₄)ₙ, where n=1-5; (GlySerSerGly)ₙ, where n=1-5; GSGGSSGG; GSSSGSGSGSSG; GSSSGSGSGSSGG; GGSSGG; GGSSGGSGGSSSG; GSSSGSGSGGSSSGSGSG; GGSSGGSSGGGSSGGSSG; and GSSSGS;

[0041] c) a second linker selected from among all or a portion of the hinge sequence of trastuzumab and all or a portion of the hinge sequence of nivolumab; and

[0042] d) a half-life extending moiety that is an IgG Fc.

[0043] In some embodiments, these constructs can contain a first linker that is a GS linker is (GGGGS)₃; and a second linker comprises the sequence SCDKTH (residues 217-222 of SEQ ID NO:31); and the IgG Fc is the Fc of trastuzumab. In other embodiments, the first linker is the GS linker is (GGGGS)₃; the second linker comprises all or a portion of the hinge sequence of nivolumab; and the IgG Fc is the Fc of nivolumab.

[0044] Provided are the constructs that are TNFR1 antagonists that comprise: a) the domain antibody (dAb) of any of SEQ ID NOs:52-672, or the scFv of any of SEQ ID NOs:673-678 or the Fab of any of SEQ ID NOs:679-682, or the nanobody of SEQ ID NO: 683 or 684, or the TNF mutein of any of SEQ ID NOs:685-703;

[0045] b) a GS linker selected from among (GlySer)ₙ, where n=1-10; (GlySer₂); (Gly₄Ser)ₙ, where n=1-10; (Gly₃Ser)ₙ, where n=1-5; (SerGly₄)ₙ, where n=1-5; (GlySerSerGly)ₙ, where n=1-5; GSGGSSGG; GSSSGSGSGSSG; GSSSGSGSGSSGG; GGSSGG; GGSSGGSGGSSSG; GSSSGSGSGGSSSGSGSG; GGSSGGSSGGGSSGGSSG; and GSSSGS; and

[0046] c) a half-life extending moiety that is a PEG molecule. The GS linker can be any described herein or known to those of skill in the art, such as (GGGGS)₃. The PEG molecule can be one that has a molecular weight of at least 25 kDa, generally at least 30 kDa or more, such as at least 40 kDa or 50 kDa, or 60 kDa, or 80 kDa, or more.

[0047] Provided are the constructs that are TNFR1 antagonist constructs, comprising:

[0048] a) the domain antibody (dAb) of any of SEQ ID NOs:52-672, or the scFv of any of SEQ ID NOs:673-678, or the Fab of any of SEQ ID NOs:679-682, or the nanobody of SEQ ID NO: 683 or 684, or the TNF mutein of any of SEQ ID NOs:685-703;

[0049] b) a GS linker selected from among (GlySer)ₙ, where n=1-10; (GlySer₂); (Gly₄Ser)ₙ, where n=1-10; (Gly₃Ser)ₙ, where n=1-5; (SerGly₄)ₙ, where n=1-5; (GlySerSerGly)ₙ, where n=1-5; GSGGSSGG; GSSSGSGSGSSG; GSSSGSGSGSSGG; GGSSGG; GGSSGGSGGSSSG; GSSSGSGSGGSSSGSGSG; GGSSGGSSGGGSSGGSSG; and GSSSGS; and

[0050] c) a half-life extending moiety that is human serum albumin. Exemplary of the linkers are any described herein, such as where the GS linker is (GGGGS)₃.

[0051] The primary amino acid sequence of any of the constructs provided herein (those described above, and below) can be optimized or modified to eliminate immunogenic sequences or immunogenic epitopes. For example, in constructs that contain an IgG Fc, the IgG Fc can be modified to comprise one or more of the following modifications: a) a modification(s) to introduce knobs-into-holes; b) a modification(s) to increase or enhance neonatal Fc receptor (FcRn) recycling; and c) a modification(s) to reduce or eliminate immune effector functions. In such constructs and in any that contain an IgG Fc the knob mutation can be selected from among S354C, T366Y, T366W, and T394W by EU numbering; and the hole mutation is selected from among Y349C, T366S, L368A, F405A, Y407T, Y407A, and Y407V by EU numbering. These TNFR1 antagonist constructs can be one where the modification(s) to increase or enhance FcRn recycling is selected from among one or more of: T250Q, T250R, M252F, M252W, M252Y, S254T, T256D, T256E, T256Q, V259I, V308F, E380A, M428L, H433K, N434F, N434A, N434W, N434S, N434Y, Y436H, M252Y/T256Q, M252F/T256D, M252Y/S254T/T256E, H433K/N434F/Y436H, N434F/Y436H, T250Q/M428L, T250R/M428L, M428L/N434S, V259I/V308F, V259I/V308F/M428L, E294del/T307P/N434Y, and T256N/A378V/S383N/N434Y, by EU numbering. The TNFR1 antagonist constructs that can be modified to reduce or eliminate immune effector function(s), such as immune effector function(s) that is/are selected from among one or more of complement-dependent cytotoxicity (CDC), antibody-dependent cell-mediated cytotoxicity (ADCC), and antibody-dependent cell-mediated phagocytosis (ADCP). For example, in these TNFR1 antagonist constructs, the modification(s) to reduce or eliminate immune effector functions are selected from among one or more of:

[0052] in IgG1: L235E, L234A/L235A, L234E/L235F/P331S, L234F/L235E/P331S, L234A/L235A/P329G, L234A/L235A/G237A/P238S/H268A/A330S/P331S, G236R/L328R, G237A, E318A, D265A, E233P, N297A, N297Q, N297D, N297G, N297G/D265A, A330L, D270A, P329A, P331A, K322A, V264A, and F241A, by EU numbering; and

[0053] in IgG4: L235E, F234A/L235A, S228P/L235E, and S228P/F234A/L235A, by EU numbering.

[0054] The TNFR1 antagonist or multispecific constructs can comprise a central PEG linker moiety; and the construct can comprise a modified Fc region, such as those described above, where Fc region is a modified IgG Fc and the modified IgG Fc comprises one or more of the following modifications:

[0055] a) a modification(s) to introduce knobs-into-holes, wherein:
[0056] the knob mutation is selected from among S354C, T366Y, T366W, and T394W by EU numbering; and
[0057] the hole mutation is selected from among Y349C, T366S, L368A, F405A, Y407T, Y407A, and Y407V by EU numbering;

[0058] b) a modification(s) to increase or enhance neonatal Fc receptor (FcRn) recycling, wherein the modification is selected from among one or more of:

[0059] T250Q, T250R, M252F, M252W, M252Y, S254T, T256D, T256E, T256Q, V259I, V308F, E380A, M428L, H433K, N434F, N434A, N434W, N434S, N434Y, Y436H, M252Y/T256Q, M252F/T256D, M252Y/S254T/T256E, H433K/N434F/Y436H, N434F/Y436H, T250Q/M428L, T250R/M428L, M428L/N434S, V259I/V308F, V259I/V308F/M428L, E294del/T307P/N434Y, and T256N/A378V/S383N/N434Y, by EU numbering; and

[0060] c) a modification(s) to increase or enhance one or more immune effector functions, wherein:
[0061] the immune effector function(s) is/are selected from among one or more of CDC, ADCC and ADCP; and
[0062] the modification(s) to increase or enhance an immune effector function is/are selected from among one or more of:
[0063] in IgG1: S239D, I332E, S239D/I332E, S239D/A330L/I332E, S298A/E333A/K334A; F243L/R292P/Y300L/V305I/P396L; L235V/F243L/R292P/Y300L/P396L; F243L/R292P/Y300L; L234Y/G236W/S298A in the first heavy chain and S239D/A330L/I332E in the second heavy chain; L234Y/L235Q/G236W/S239M/H268D/D270E/S298A in the first heavy chain and D270E/K326D/A330M/K334E in the second heavy chain; A327Q/P329A; D265A/S267A/H268A/D270A/K326A/S337A; T256A/K290A/S298A/E333A/K334A; G236A; G236A/I332E; G236A/S239D/I332E; G236A/S239D/A330L/I332E; introduction of a biantennary glycan at residue N297; introduction of an afucosylated glycan at residue N297; K326W; K326A; E333A; K326A/E333A; K326W/E333S; K326M/E333S; K222W/T223W; K222W/T223W/H224W; D221W/K222W; C220D/D221C; C220D/D221C/K222W/T223W; H268F/S324T; S267E; H268F; S324T; S267E/H268F/S324T; G236A/I332E/S267E/H268F/S324T; E345R; and E345R/E430G/S440Y; by EU numbering.

[0064] In some embodiments, of any of the constructs that comprises an Fc region, the construct can comprise an IgG1 Fc that comprises one or more modifications to increase binding to the inhibitory Fcγ receptor (FcγR) FcγRIIb. For example, the modification or modifications that increase binding to FcγRIIb is/are selected from among one or more of S267E, N297A, L328F, L351S, T366R, L368H, P395K, S267E/L328F and L351S/T366R/L368H/P395K, by EU numbering.

[0065] Also provided are constructs that are a Treg expander construct. Included among such constructs are those comprising: a) a Treg expander; b) a linker, wherein a linker increases flexibility of the construct, and/or moderates or reduces steric effects of the construct or its interaction with a receptor, and/or increases solubility in aqueous media of the construct; and c) an activity modifier, wherein an activity modifier is a moiety that modulates or alters the activity or the pharmacological property of the construct compared to the construct in the absence of the activity modifier. The Treg expander can be a TNFR2 agonist. These constructs can further comprise a TNFR1-inhibitor. In some embodiments, the TNFR2 agonist is a TNFR2 selective agonist.

[0066] Provided are the constructs described herein that are TNFR2 agonist constructs, comprising: a) a TNFR2 agonist; b) a linker, wherein a linker increases flexibility of the construct, and/or moderates or reduces steric effects of the construct or its interaction with a receptor, and/or increases solubility in aqueous media of the construct; and c) an activity modifier, wherein an activity modifier is a moiety that modulates or alters the activity or the pharmacological property of the construct compared to the construct in the absence of the activity modifier. In TNFR2 agonist constructs, the TNFR2 agonist can be a TNFR2-selective agonist. The constructs can comprise an activity modifier, such as an activity modifier that is a half-life extending moiety. The constructs can be TNFR2 agonist constructs that selectively activate or antagonize TNFR2, without activating or antagonizing TNFR1. Included are TNFR2 agonist constructs, where the TNFR2 agonist binds to one or more epitopes within TNFR2. These include human TNFR2. Such epitopes include, for example, epitopes selected from among one or more of the epitopes comprising or consisting of the sequences of amino acids set forth in SEQ ID NOs:839-865, 1202 and 1204.

[0067] Provided are the TNFR2 agonist constructs, where the TNFR2 agonist comprises an antigen-binding fragment of an agonist human anti-TNFR2 antibody or humanized anti-TNFR2 antibody, or antigen-binding portion thereof, or a single chain form thereof. Exemplary of such antibodies are agonist anti-TNFR2 antibody is selected from MR2-1 (also designated ab8161; U.S. Pat. No. 9,821,010) or MAB2261 (U.S. Pat. No. 9,821,010). The TNFR2 agonist can be an antigen-binding fragment selected from a dAb, scFv, or Fab fragment. In some embodiments, the TNFR2 agonist is a TNFR2-selective agonist. The selective agonist can comprise a TNFR2 agonist TNF mutein. Exemplary TNFR2 selective agonist muteins include, but are not limited to soluble TNF variants comprising one or more TNFR2-selective mutations selected from among K65W, D143Y, D143F, D143N, D143E, D143W, D143V, A145R, A145H, A145K, A145F, A145W, E146Q, E146H, E146K, E146N, D143N/A145R, A145R/S147T, Q88N/T89S/A145S/E146A/S147D, Q88N/A145I/E146G/S147D, A145H/E146S/S147D, A145H/S147D, L29V/A145D/E146D/S147D, A145N/E146D/S147D, A145T/E146S/S147D, A145Q/E146D/S147D, A145T/E146D/S147D, A145D/E146G/S147D, A145D/S147D, A145K/E146D/S147T, A145R/E146T/S147D, A145R/S147T, E146D/S147D, D143V/F144L/A145S, S95C/G148C, and D143V/A145S, and combinations of any of the preceding, all with reference to SEQ ID NO:2. For example, a TNFR2 agonist is a TNF mutein comprising the mutations D143N/A145R.

[0068] In the TNFR2 agonist constructs, linkers include any described herein or known to those of skill in the art for use as linkers. Exemplary linkers comprise all or a portion of the hinge sequence of trastuzumab, corresponding to residues 219-233 of SEQ ID NO:26, or comprises all or a portion of the hinge sequence of nivolumab, corresponding to residues 212-223 of SEQ ID NO:29, or a sequence having at least 95% sequence identity thereto. Other exemplary linkers comprise or consist of the sequence SCDKTH, corresponding to residues 217-222 of SEQ ID NO:31. The linker can be a glycine-serine (GS) linker, such as, but not limited to, a GS linker selected from among (GlySer)ₙ, where n=1-10; (GlySer₂); (Gly₄Ser)ₙ, where n=1-10; (Gly₃Ser)ₙ, where n=1-5; (SerGly₄)ₙ, where n=1-5; (GlySerSerGly)ₙ, where n=1-5; GSGGSSGG; GSSSGSGSGSSG; GSSSGSGSGSSGG; GGSSGG; GGSSGGSGGSSSG; GSSSGSGSGGSSSGSGSG; GGSSGGSSGGGSSGGSSG; and GSSSGS. Linkers can comprise combinations of likers, such as, for example, a linker that comprises a GS linker and all or a portion of the hinge sequence of trastuzumab, corresponding to residues 219-233 of SEQ ID NO:26, or a GS linker and the sequence SCDKTH, corresponding to residues 217-222 of SEQ ID NO:31, or a GS linker and all or a portion of the hinge sequence of nivolumab, corresponding to residues 212-223 of SEQ ID NO:29.

[0069] All of the constructs provided herein can include an activity modifier that alters or modulates a property or activity of a construct. For example, a half-life extending moiety is an activity or property modifier. Exemplary of such as discussed above and also below, are IgG Fc, a polyethylene glycol (PEG) molecule, and human serum albumin (HSA), or portions or derivative of variants thereof. For example, in some the IgG Fc is an IgG1 or IgG4 Fc. Exemplary of the IgG1 Fc is the Fc of trastuzumab, set forth in SEQ ID NO:27; and of the IgG4 Fc is the Fc of nivolumab, set forth in SEQ ID NO:30, human versions, where the IgG1 Fc is the Fc of human IgG1, set forth in SEQ ID NO:10, and the IgG4 Fc is the Fc of human IgG4, set forth in SEQ ID NO:16.

[0070] In some embodiments of the TNFR2 agonist constructs, the TNFR2 agonist is monovalent; in others it is multivalent, such as bivalent or trivalent. The TNFR2 constructs can contain linkers as described herein. For example, the linker can comprise Gly-Ser, such as (Gly₄Ser)₃, or (Gly₄Ser)₃ and SCDKTH (residues 217-222 of SEQ ID NO:31), or (Gly₄Ser)₃ and the hinge sequence of trastuzumab, corresponding to residues 219-233 of SEQ ID NO:26, or (Gly₄Ser)₃ and the hinge sequence of nivolumab, corresponding to residues 212-223 of SEQ ID NO:29, or variants of any of the preceding that have at least 95% sequence identity thereto. These constructs also can include an activity modifier, such as a modifier that is a half-life extending moiety, such as a PEG, or HSA as described above. PEG moieties have a size of at least 20 kDa, typically at least 30 kDa or more as described above and below.

[0071] Also provided are TNFR2 agonist constructs that comprise:

[0072] a) a TNFR2 agonist that binds to one or more epitopes within human TNFR2 that is selected from among the epitopes set forth in SEQ ID NOs:839-865, 1202 and 1204;

[0073] b) a GS linker selected from among (GlySer)ₙ, where n=1-10; (GlySer₂); (Gly₄Ser)ₙ, where n=1-10; (Gly₃Ser)ₙ, where n=1-5; (SerGly₄)ₙ, where n=1-5; (GlySerSerGly)ₙ, where n=1-5; GSGGSSGG; GSSSGSGSGSSG; GSSSGSGSGSSGG; GGSSGG; GGSSGGSGGSSSG; GSSSGSGSGGSSSGSGSG; GGSSGGSSGGGSSGGSSG; and GSSSGS; and

[0074] c) an activity modifier that is a half-life extending moiety that is an IgG Fc. As above, in exemplary embodiments, the GS linker can be (GGGGS)₃; and the IgG Fc is the Fc of trastuzumab or the Fc of nivolumab.

[0075] Other TNFR2 agonist constructs comprise:

[0076] a) a TNFR2 agonist that binds to one or more epitopes within human TNFR2 that is selected from among the epitopes set forth in SEQ ID NOs:839-865, 1202 and 1204;

[0077] b) a linker selected from among all or a portion of the hinge sequence of trastuzumab and all or a portion of the hinge sequence of nivolumab; and

[0078] c) an activity modifier that is a half-life extending moiety that is an IgG Fc. Exemplary of the linker and activity modifier is the hinge sequence of trastuzumab; and the IgG Fc is the Fc of trastuzumab, or all or a portion of the hinge sequence of nivolumab; and the IgG Fc is the Fc of nivolumab.

[0079] In other embodiments, the TNFR2 construct comprises:

[0080] a) a TNFR2 agonist that binds to one or more epitopes within human TNFR2 that is selected from among the epitopes set forth in SEQ ID NOs:839-865, 1202 and 1204;

[0081] b) a first linker that is a GS linker selected from among (GlySer)ₙ, where n=1-10; (GlySer₂); (Gly₄Ser)ₙ, where n=1-10; (Gly₃Ser)ₙ, where n=1-5; (SerGly₄)ₙ, where n=1-5; (GlySerSerGly)ₙ, where n=1-5; GSGGSSGG; GSSSGSGSGSSG; GSSSGSGSGSSGG; GGSSGG; GGSSGGSGGSSSG; GSSGSGSGGSSSGSGSG; GGSSGGSSGGGSSGGSSG; and GSSSGS;

[0082] c) a second linker selected from among all or a portion of the hinge sequence of trastuzumab and all or a portion of the hinge sequence of nivolumab; and

[0083] d) an activity modifier that is a half-life extending moiety that is an IgG Fc. Exemplary of such constructs are those in which the first GS linker is (GGGGS)₃, and the second linker comprises the sequence SCDKTH (residues 217-222 of SEQ ID NO:31); and the IgG Fc is the Fc of trastuzumab. In other embodiments, the first linker is (GGGGS)₃, the second linker comprises all or a portion of the hinge sequence of nivolumab; and the IgG Fc is the Fc of nivolumab.

[0084] In some embodiments, the construct is a TNFR2 agonist construct, comprising:

[0085] a) the TNFR2 agonist that comprises an antigen-binding fragment of an agonist human anti-TNFR2 antibody selected from MR2-1 or MAB2261;

[0086] b) a linker comprising:
[0087] i) a GS linker selected from among (GlySer)ₙ, where n=1-10; (GlySer₂); (Gly₄Ser)ₙ, where n=1-10; (Gly₃Ser)ₙ, where n=1-5; (SerGly₄)ₙ, where n=1-5; (GlySerSerGly)ₙ, where n=1-5; GSGGSSGG; GSSSGSGSGSSG; GSSSGSGSGSSGG; GGSSGG; GGSSGGSGGSSSG; GSSSGSGSGGSSSGSGSG; GGSSGGSSGGGSSGGSSG; and GSSSGS; and/or
[0088] ii) all or a portion of the hinge sequence of trastuzumab or all or a portion of the hinge sequence of nivolumab; and

[0089] c) an activity modifier that is a half-life extending moiety selected from among an IgG1 or IgG4 Fc, a PEG molecule, and human serum albumin (HSA), wherein:
[0090] the IgG1 Fc is the Fc of human IgG1, set forth in SEQ ID NO:10, or is the Fc of trastuzumab, set forth in SEQ ID NO:27; and
[0091] the PEG molecule has a molecular weight of at least or at least about 30 kDa.

[0092] In some embodiments, that construct is a TNFR2 agonist construct, comprising:

[0093] a) TNFR2-selective TNF mutein that is a soluble TNF variant comprising one or more TNFR2-selective mutations selected from among K65W, D143Y, D143F, D143N, D143E, D143W, D143V, A145R, A145H, A145K, A145F, A145W, E146Q, E146H, E146K, E146N, D143N/A145R, A145R/S147T, Q88N/T89S/A145S/E146A/S147D, Q88N/A145I/E146G/S147D, A145H/E146S/S147D, A145H/S147D, L29V/A145D/E146D/S147D, A145N/E146D/S147D, A145T/E146S/S147D, A145Q/E146D/S147D, A145T/E146D/S147D, A145D/E146G/S147D, A145D/S147D, A145K/E146D/S147T, A145R/E146T/S147D, A145R/S147T, E146D/S147D, D143V/F144L/A145S, S95C/G148C, and D143V/A145S, with reference to SEQ ID NO:2;

[0094] b) a linker comprising:
[0095] i) a GS linker selected from among (GlySer)ₙ, where n=1-10; (GlySer₂); (Gly₄Ser)ₙ, where n=1-10; (Gly₃Ser)ₙ, where n=1-5; (SerGly₄)ₙ, where n=1-5; (GlySerSerGly)ₙ, where n=1-5; GSGGSSGG; GSSSGSGSGSSG; GSSSGSGSGSSGG; GGSSGG; GGSSGGSGGSSSG; GSSSGSGSGGSSSGSGSG; GGSSGGSSGGGSSGGSSG; and GSSSGS; and/or
[0096] ii) all or a portion of the hinge sequence of trastuzumab or all or a portion of the hinge sequence of nivolumab; and

[0097] c) an activity modifier that is a half-life extending moiety selected from among an IgG1 or IgG4 Fc, a PEG molecule, and human serum albumin (HSA), wherein:
[0098] the IgG1 Fc is the Fc of human IgG1, set forth in SEQ ID NO:10, or is the Fc of trastuzumab, set forth in SEQ ID NO:27; and
[0099] the PEG molecule has a molecular weight of at least or at least about 30 kDa.

[0100] In some embodiments, the construct is a TNFR2 agonist construct, comprising:

[0101] a) a TNFR2 TNF mutein comprising the mutations D143N/A145R;

[0102] b) a (GGGGS)₃ linker; and

[0103] c) an activity modifier that is a half-life extending moiety that is the Fc of trastuzumab or the Fc of nivolumab.

[0104] In some embodiments, the construct is a TNFR2 agonist construct that comprises:

[0105] a) a TNFR2-selective TNF mutein comprising the mutations D143N/A145R;

[0106] b) a (GGGGS)₃ linker and a second linker that comprises the sequence SCDKTH (residues 217-222 of SEQ ID NO:31); and

[0107] c) an activity modifier that is a half-life extending moiety that is the Fc of trastuzumab.

[0108] In some embodiments, the construct is a TNFR2 agonist construct, comprising:

[0109] a) a TNFR2-selective TNF mutein comprising the mutations D143N/A145R;

[0110] b) a (GGGGS)₃ linker and a second linker that comprises all or a portion of the hinge sequence of nivolumab; and

[0111] c) an activity modifier that is a half-life extending moiety that is the Fc of nivolumab.

[0112] In some embodiments, the construct is a TNFR2 agonist construct that comprises:

[0113] a) a TNFR2-selective TNF mutein comprising the mutations D143N/A145R;

[0114] b) a linker comprising all or a portion of the hinge sequence of trastuzumab, corresponding to residues 219-233 of SEQ ID NO:26; and

[0115] c) a half-life extending moiety that is the Fc of trastuzumab.

[0116] In some embodiments, the construct is a TNFR2 agonist construct that comprises:

[0117] a) a TNFR2-selective TNF mutein comprising the mutations D143N/A145R;

[0118] b) a linker comprising all or a portion of the hinge sequence of nivolumab, corresponding to residues 212-223 of SEQ ID NO:29; and

[0119] c) an activity modifier that is a half-life extending moiety that is the Fc of nivolumab.

[0120] Provided are TNFR1 antagonist constructs, TNFR2 agonist constructs, and both, where the IgG Fc is a monomer or a dimer. The constructs provided herein can comprise a dAb (or a Vhh). The constructs can comprise a Vhh single chain or double chain containing a dAb. These constructs can contain HSA linked to the dAb directly or via a linker. They HSA and dAb can be linked in any order, such as the C-terminus of the dAb linked directly or via a linker, such as any described above, to the N-terminus of HSA. Exemplary of such constructs are those that comprise:

[0121] a) residues 20-732, which is the dAb Dom1h-131-206 of SEQ ID NO:59, linked via a linker to HSA, as set forth in SEQ ID NO:1475, or a construct having at least 95%, 96%, 97%, 98%, 99% sequence identity to the construct of SEQ ID NO:1475 or to residues 20-732 of SEQ ID NO:1475 and having TNFR1 antagonist activity; or

[0122] b) a dAb set forth in in any of SEQ ID NOs: 53-83 and 503-671, and variants thereof having at least 95%, 96%, 97%, 98%, 99% sequence identity thereto, whereby the construct has TNFR1 antagonist activity; or

[0123] c) a dAb that has the sequence set forth in any of SEQ ID NOs:57-59 and variants thereof have at least 95% sequence identity thereto, whereby the construct has TNFR1 antagonist activity; or

[0124] d) the dAb is designated DOM1h-131-206 of SEQ ID NO:59 and variants thereof that have at least 95%, 96%, 97%, 98%, 99% sequence identity thereto, and have TNFR1 antagonist activity; or

[0125] e) combinations of any of a)-d); or

[0126] f) humanized sequences of any of a)-f) or where a sufficient portion of the construct for administration to a human is humanized, where a sufficient portion is sufficient to eliminate or reduce any immune response to the construct when administered to a human.

[0127] The constructs provided herein that are TNFR1 constructs can further comprise a TNFR2 agonist or the construct can be a TNFR2 agonist construct. In the constructs that comprise a TNFR2 agonist, the TNFR2 agonist can be modified to eliminate sequences of amino acids or epitopes that are immunogenic in the subject to be treated, such as for administration to a human subject. In the constructs that contain TNFR2 agonist, it can be a TNFR2-selective agonist. These constructs can comprise a modified IgG Fc. For example, the IgG Fc can comprise one or more of the following modifications:

[0128] a) a modification(s) to introduce knobs-into-holes;

[0129] b) a modification(s) to increase or enhance neonatal Fc receptor (FcRn) recycling; and

[0130] c) a modification(s) to reduce or eliminate immune effector functions, selected from among one or more of complement-dependent cytotoxicity (CDC), antibody-dependent cell-mediated cytotoxicity (ADCC) and antibody-dependent cell-mediated phagocytosis (ADCP). Exemplary of such modifications are:

[0131] a) a modification(s) to introduce knobs-into-holes are selected from:

[0132] one or more knob mutations selected from among S354C, T366Y, T366W, and T394W by EU numbering; and

[0133] one or more hole mutations selected from among Y349C, T366S, L368A, F405A, Y407T, Y407A, and Y407V by EU numbering, whereby the Fc forms a dimer;

[0134] b) the modification(s) to increase or enhance FcRn recycling is selected from among one or more of T250Q, T250R, M252F, M252W, M252Y, S254T, T256D, T256E, T256Q, V259I, V308F, E380A, M428L, H433K, N434F, N434A, N434W, N434S, N434Y, Y436H, M252Y/T256Q, M252F/T256D, M252Y/S254T/T256E, H433K/N434F/Y436H, N434F/Y436H, T250Q/M428L, T250R/M428L, M428L/N434S, V259I/V308F, V259I/V308F/M428L, E294del/T307P/N434Y, and T256N/A378V/S383N/N434Y, by EU numbering; and

[0135] c) the modification(s) to reduce or eliminate immune effector functions are selected from among one or more of:
[0136] in IgG1: L235E, L234A/L235A, L234E/L235F/P331S, L234F/L235E/P331S, L234A/L235A/P329G, L234A/L235A/G237A/P238S/H268A/A330S/P331S, G236R/L328R, G237A, E318A, D265A, E233P, N297A, N297Q, N297D, N297G, N297G/D265A, A330L, D270A, P329A, P331A, K322A, V264A, and F241A, by EU numbering; and
[0137] in IgG4: L235E, F234A/L235A, S228P/L235E, and S228P/F234A/L235A, by EU numbering.

[0138] Constructs provided herein include TNFR2 agonist constructs that contain a modified IgG Fc, where the IgG Fc comprises one or more of the following modifications:

[0139] a) one or more modification(s) to introduce knobs-into-holes, wherein:
[0140] the knob mutation is selected from among S354C, T366Y, T366W, and T394W by EU numbering; and
[0141] the hole mutation is selected from among Y349C, T366S, L368A, F405A, Y407T, Y407A, and Y407V by EU numbering;

[0142] b) a modification(s) to increase or enhance neonatal Fc receptor (FcRn) recycling, wherein the modification is selected from among one or more of:
[0143] T250Q, T250R, M252F, M252W, M252Y, S254T, T256D, T256E, T256Q, V259I, V308F, E380A, M428L, H433K, N434F, N434A, N434W, N434S, N434Y, Y436H, M252Y/T256Q, M252F/T256D, M252Y/S254T/T256E, H433K/N434F/Y436H, N434F/Y436H, T250Q/M428L, T250R/M428L, M428L/N434S, V259I/V308F, V259I/V308F/M428L, E294del/T307P/N434Y, and T256N/A378V/S383N/N434Y, by EU numbering; and

[0144] c) a modification(s) to increase or enhance immune effector functions, wherein:
[0145] the immune effector functions are selected from among one or more of CDC, ADCC and ADCP; and
[0146] the modification(s) in to increase or enhance immune effector functions is selected from among one or more of:
   [0147] in IgG1: S239D, I332E, S239D/I332E, S239D/A330L/I332E, S298A/E333A/K334A; F243L/R292P/Y300L/V305I/P396L; L235V/F243L/R292P/Y300L/P396L; F243L/R292P/Y300L; L234Y/G236W/S298A in the first heavy chain and S239D/A330L/I332E in the second heavy chain; L234Y/L235Q/G236W/S239M/H268D/D270E/S298A in the first heavy chain and D270E/K326D/A330M/K334E in the second heavy chain; A327Q/P329A; D265A/S267A/H268A/D270A/K326A/S337A; T256A/K290A/S298A/E333A/K334A; G236A; G236A/I332E; G236A/S239D/I332E; G236A/S239D/A330L/I332E; introduction of a biantennary glycan at residue N297; introduction of an afucosylated glycan at residue N297; K326W; K326A; E333A; K326A/E333A; K326W/E333 S; K326M/E333 S; K222W/T223W; K222W/T223W/H224W; D221W/K222W; C220D/D221C; C220D/D221C/K222W/T223W; H268F/S324T; S267E; H268F; S324T; S267E/H268F/S324T; G236A/I332E/S267E/H268F/S324T; E345R; and E345R/E430G/S440Y; by EU numbering.

[0148] The constructs provided herein that are TNFR2 agonist construct can comprise a modified IgG1 Fc, such as where the Fc is modified to increase binding to the inhibitory Fcγ receptor (FcγR) FcγRIIb, which can include modifications that increase binding to FcγRIIb. Exemplary of such modifications are those selected from among one or more of S267E, N297A, L328F, L351S, T366R, L368H, P395K, S267E/L328F and L351S/T366R/L368H/P395K, by EU numbering.

[0149] Provided are constructs that are or comprise a TNFR2 agonist construct that selectively activates or agonizes TNFR2, without activating or antagonizing TNFR1. These constructs include those comprising: a) a TNFR2 agonist; b) one or more linkers; and c) an activity modifier that is a half-life extending moiety, where:

[0150] the TNFR2 agonist construct is a fusion protein comprising single-chain TNFR2-selective TNF mutein trimers fused with a multimerization domain, and comprises the formula:

MD-L1-TNFmut-L2-TNFmut-L3-TNFmut (Formula II); or

TNFmut-L1-TNFmut-L2-TNFmut-L3-MD (Formula III);

[0151] MD is a multimerization domain and each is/are the same or different; TNFmut is a TNFR2-selective TNF mutein; and L1, L2 and L3 are linkers that can be the same or different. The TNF muteins can comprise one or more TNFR2-selective mutations selected from among K65W, D143Y, D143F, D143N, D143E, D143W, D143V, A145R, A145H, A145K, A145F, A145W, E146Q, E146H, E146K, E146N, D143N/A145R, A145R/S147T, Q88N/T89S/A145S/E146A/S147D, Q88N/A145I/E146G/S147D, A145H/E146S/S147D, A145H/S147D, L29V/A145D/E146D/S147D, A145N/E146D/S147D, A145T/E146S/S147D, A145Q/E146D/S147D, A145T/E146D/S147D, A145D/E146G/S147D, A145D/S147D, A145K/E146D/S147T, A145R/E146T/S147D, A145R/S147T, E146D/S147D, D143V/F144L/A145S, S95C/G148C, and D143V/A145S, with reference to SEQ ID NO:2, such as, for example, the TNFR2-selective mutations D143N/A145R. In these constructs, the multimerization domain can be selected from EHD2 (SEQ ID NO:808), M1HD2 (SEQ ID NO:811), the trimerization domain of chicken tenascin C (TNC) (residues 110-139 of SEQ ID NO:804; SEQ ID NO:805), or the trimerization domain of human TNC (residues 110-139 of SEQ ID NO:806, SEQ ID NO:807), or variants thereof having at least 95%, 96%, 97%, 98%, 99% sequence identity thereto. For example, the multimerization domain is an IgG1 Fc or an IgG4 Fc and the IgG1 Fc or IgG4 Fc also is a half-life extending moiety. These constructs contain linkers, including any described herein and any known to those of skill in the art. Exemplary of these constructs are those where the L1, L2 and/or L3 linkers are independently selected from among (GGGGS)ₙ, where n=1-5, and all or a portion of the stalk region of TNF (SEQ ID NO:812) or a variant thereof having at least 95%, 96%, 97%, 98%, 99% sequence identity thereto. These constructs include those where the linker between the TNFR2 agonist and the half-life extending moiety is: a GS linker selected from among (GlySer)ₙ, where n=1-10; (GlySer₂); (Gly₄Ser)ₙ, where n=1-10; (Gly₃Ser)ₙ, where n=1-5; (SerGly₄)ₙ, where n=1-5; (GlySerSerGly)ₙ, where n=1-5; GSGGSSGG; GSSSGSGSGSSG; GSSSGSGSGSSGG; GGSSGG; GGSSGGSGGSSSG; GSSSGSGSGGSSSGSGSG; GGSSGGSSGGGSSGGSSG; and GSSSGS; or a linker selected from among all or a portion of the hinge sequence of trastuzumab and all or a portion of the hinge sequence of nivolumab; or a combination thereof. The half-life extending moiety can be selected from among: an IgG1 Fc that is the Fc of human IgG1, set forth in SEQ ID NO:10, or the Fc of trastuzumab, set forth in SEQ ID NO:27; an IgG4 Fc that is the Fc of human IgG4 set forth in SEQ ID NO:16, or the Fc of nivolumab, set forth in SEQ ID NO:30; a PEG molecule that is at least or at least about 30 kDa in size; human serum albumin (HSA), and variants of the polypeptide portions having at least 95%, 96%, 97%, 98%, 99% sequence identity thereto.

[0152] Provided are constructs that are or comprise a TNFR2 agonist construct. These constructs include those that comprise the formula:

MD-L1-TNFmut-L2-TNFmut-L3-TNFmut (Formula II); or

TNFmut-L1-TNFmut-L2-TNFmut-L3-MD (Formula III), where:

[0153] a) MD is a multimerization domain; TNFmut is a TNFR2-selective TNF mutein; and L1, L2 and L3 are linkers that can be the same or different, wherein:
[0154] i) the MD is selected from EHD2 (SEQ ID NO:808), MHD2 (SEQ ID NO:811), the trimerization domain of chicken tenascin C (TNC) (residues 110-139 of SEQ ID NO:804; SEQ ID NO:805), or the trimerization domain of human TNC (residues 110-139 of SEQ ID NO:806, SEQ ID NO:807);
[0155] ii) L1, L2 and L3 each are (GGGGS)ₙ, where n=1-5, or all or a portion of the stalk region of TNF (SEQ ID NO:812), or a mixture thereof, and
[0156] iii) the TNF muteins comprise the TNFR2-selective mutations D143N/A145R;

[0157] b) a half-life extending moiety selected from among:
[0158] an IgG1 Fc that is the Fc of human IgG1, set forth in SEQ ID NO:10, or the Fc of trastuzumab, set forth in SEQ ID NO:27;
[0159] an IgG4 Fc that is the Fc of human IgG4 set forth in SEQ ID NO:16, or the Fc of nivolumab, set forth in SEQ ID NO:30;
[0160] a PEG molecule that is at least or at least about 30 kDa in size; and
[0161] human serum albumin (HSA); and

[0162] c) a linker between the TNFR2-selective agonist and the half-life extending moiety, wherein the linker comprises:

[0163] a GS linker selected from among (GlySer)ₙ, where n=1-10; (GlySer₂); (Gly₄Ser)ₙ, where n=1-10; (Gly₃Ser)ₙ, where n=1-5; (SerGly₄)ₙ, where n=1-5; (GlySerSerGly)ₙ, where n=1-5; GSGGSSGG; GSSSGSGSGSSG; GSSSGSGSGSSGG; GGSSGG; GGSSGGSGGSSSG; GSSSGSGSGGSSSGSGSG; GGSSGGSSGGGSSGGSSG; and GSSSGS; or

[0164] a linker selected from among all or a portion of the hinge sequence of trastuzumab and all or a portion of the hinge sequence of nivolumab; or

[0165] a combination thereof.

[0166] The constructs include TNFR2 agonist constructs, comprising the formula:

MD-L1-TNFmut-L2-TNFmut-L3-TNFmut (Formula II); or

TNFmut-L1-TNFmut-L2-TNFmut-L3-MD (Formula III),

[0167] wherein MD is a multimerization domain; TNFmut is a TNFR2-selective TNF mutein; and L1, L2 and L3 are linkers that can be the same or different, and wherein:
[0168] i) the MD is selected from an IgG1 Fc or an IgG4 Fc;
[0169] ii) L2 and L3 in Formula II, and L1 and L2 in Formula III each independently is (GGGGS)ₙ, where n=1-5, or all or a portion of the stalk region of TNF (SEQ ID NO:812), or a combination thereof,
[0170] iii) each of L1 in Formula II and L3 in Formula III is independently selected from among:
   [0171] a GS linker selected from among (GlySer)ₙ, where n=1-10; (GlySer₂); (Gly₄Ser)ₙ, where n=1-10; (Gly₃Ser)ₙ, where n=1-5; (SerGly₄)ₙ, where n=1-5; (GlySerSerGly)ₙ, where n=1-5; GSGGSSGG; GSSSGSGSGSSG; GSSSGSGSGSSGG; GGSSGG; GGSSGGSGGSSSG; GSSSGSGSGGSSSGSGSG; GGSSGGSSGGGSSGGSSG; and GSSSGS; or
   [0172] a linker selected from among all or a portion of the hinge sequence of trastuzumab and all or a portion of the hinge sequence of nivolumab; or
   [0173] a combination thereof, and
[0174] iv) the TNF muteins comprise the TNFR2-selective mutations D143N/A145R. In these constructs the MD can be selected from:
[0175] an IgG1 Fc that is the Fc of human IgG1, set forth in SEQ ID NO:10, or the Fc of trastuzumab, set forth in SEQ ID NO:27; or
[0176] an IgG4 Fc that is the Fc of human IgG4 set forth in SEQ ID NO:16, or the Fc of nivolumab, set forth in SEQ ID NO:30; or
[0177] combinations or variants thereof having at least 95%, 96%, 97%, 98%, 99% sequence identity thereto.

[0178] Exemplary constructs are those that include an MD that is the IgG1 Fc of trastuzumab, and the linker between the MD and the adjacent TNF mutein is all or a portion of the hinge sequence of trastuzumab, corresponding to residues 219-233 of SEQ ID NO:26, or an MD that is the IgG1 Fc of trastuzumab, and the linker between the MD and the adjacent TNF mutein comprises the sequence SCDKTH (residues 217-222 of SEQ ID NO:31). An exemplary construct is one that comprises an MD that is the IgG1 Fc of trastuzumab, where the linker between the MD and the adjacent TNF mutein comprises (Gly₄Ser)₃ and the hinge sequence of trastuzumab, corresponding to residues 219-233 of SEQ ID NO:26. In some embodiments, the MD is the IgG1 Fc of trastuzumab, and the linker between the MD and the adjacent TNF mutein comprises (Gly₄Ser)₃ and SCDKTH (residues 222-227 of SEQ ID NO:31), those wherein the MD is the IgG4 Fc of nivolumab, and the linker between the MD and the adjacent TNF mutein comprises all or a portion of the hinge sequence of nivolumab, corresponding to residues 212-223 of SEQ ID NO:29, or those where the MD is the IgG4 Fc of nivolumab, and the linker between the MD and the adjacent TNF mutein comprises (Gly₄Ser)₃ and all or a portion of the hinge sequence of nivolumab, corresponding to residues 212-223 of SEQ ID NO:29.

[0179] The constructs herein, including the agonists constructs, can be modified to eliminate immunogenic sequences, such as those immunogenic to humans. Provided herein are TNFR2 agonist constructs, where the TNFR2 agonist is modified to eliminate immunogenic sequences or epitopes that are immunogenic in the subject, such as a human subject.

[0180] In constructs provided herein that are TNFR2 agonist constructs and that comprise a modified IgG Fc, the IgG Fc can comprise one or more of the following modifications:

[0181] a) a modification(s) to introduce knobs-into-holes, wherein:
[0182] the knob mutation is selected from among one or more of S354C, T366Y, T366W, and T394W by EU numbering; and
[0183] the hole mutation is selected from among one or more of Y349C, T366S, L368A, F405A, Y407T, Y407A, and Y407V by EU numbering;

[0184] b) a modification(s) to increase or enhance neonatal Fc receptor (FcRn) recycling, wherein the modification is selected from among one or more of:
[0185] T250Q, T250R, M252F, M252W, M252Y, S254T, T256D, T256E, T256Q, V259I, V308F, E380A, M428L, H433K, N434F, N434A, N434W, N434S, N434Y, Y436H, M252Y/T256Q, M252F/T256D, M252Y/S254T/T256E, H433K/N434F/Y436H, N434F/Y436H, T250Q/M428L, T250R/M428L, M428L/N434S, V259I/V308F, V259I/V308F/M428L, E294del/T307P/N434Y, and T256N/A378V/S383N/N434Y, by EU numbering; and

[0186] c) a modification(s) to reduce or eliminate immune effector functions, wherein:
[0187] the immune effector functions are selected from among one or more of CDC, ADCC and ADCP; and
[0188] the modification(s) in to reduce or eliminate immune effector functions is selected from among one or more of:
   [0189] in IgG1: L235E, L234A/L235A, L234E/L235F/P331S, L234F/L235E/P331S, L234A/L235A/P329G, L234A/L235A/G237A/P238S/H268A/A330S/P331S, G236R/L328R, G237A, E318A, D265A, E233P, N297A, N297Q, N297D, N297G, N297G/D265A, A330L, D270A, P329A, P331A, K322A, V264A, and F241A, by EU numbering; and
   [0190] in IgG4: L235E, F234A/L235A, S228P/L235E, and S228P/F234A/L235A, by EU numbering.

[0191] Provided are any of the foregoing constructs that are TNFR2 agonist constructs that comprise a modified IgG Fc, wherein the IgG Fc comprises one or more of the following modifications:

[0192] a) a modification(s) to introduce knobs-into-holes, wherein:
[0193] the knob mutation is selected from among one or more of S354C, T366Y, T366W, and T394W by EU numbering; and
[0194] the hole mutation is selected from among one or more of Y349C, T366S, L368A, F405A, Y407T, Y407A, and Y407V by EU numbering;

[0195] b) a modification(s) to increase or enhance neonatal Fc receptor (FcRn) recycling, wherein the modification is selected from among one or more of:
[0196] T250Q, T250R, M252F, M252W, M252Y, S254T, T256D, T256E, T256Q, V259I, V308F, E380A, M428L, H433K, N434F, N434A, N434W, N434S, N434Y, Y436H, M252Y/T256Q, M252F/T256D, M252Y/S254T/T256E, H433K/N434F/Y436H, N434F/Y436H, T250Q/M428L, T250R/M428L, M428L/N434S, V259I/V308F, V259I/V308F/M428L, E294del/T307P/N434Y, and T256N/A378V/S383N/N434Y, by EU numbering; and

[0197] c) a modification(s) to increase or enhance immune effector functions, wherein:
[0198] the immune effector functions are selected from among one or more of CDC, ADCC and ADCP; and
[0199] the modification(s) in to increase or enhance immune effector functions is selected from among one or more of:
   [0200] in IgG1: S239D, I332E, S239D/I332E, S239D/A330L/I332E, S298A/E333A/K334A; F243L/R292P/Y300L/V305I/P396L; L235V/F243L/R292P/Y300L/P396L; F243L/R292P/Y300L; L234Y/G236W/S298A in the first heavy chain and S239D/A330L/I332E in the second heavy chain; L234Y/L235Q/G236W/S239M/H268D/D270E/S298A in the first heavy chain and D270E/K326D/A330M/K334E in the second heavy chain; A327Q/P329A; D265A/S267A/H268A/D270A/K326A/S337A; T256A/K290A/S298A/E333A/K334A; G236A; G236A/I332E; G236A/S239D/I332E; G236A/S239D/A330L/I332E; introduction of a biantennary glycan at residue N297; introduction of an afucosylated glycan at residue N297; K326W; K326A; E333A; K326A/E333A; K326W/E333 S; K326M/E333 S; K222W/T223W; K222W/T223W/H224W; D221W/K222W; C220D/D221C; C220D/D221C/K222W/T223W; H268F/S324T; S267E; H268F; S324T; S267E/H268F/S324T; G236A/I332E/S267E/H268F/S324T; E345R; and E345R/E430G/S440Y; by EU numbering.

[0201] Provided are any of the foregoing TNFR2 agonist constructs that comprise an IgG1 Fc that is modified to increase binding to the inhibitory Fcγ receptor (FcγR) FcγRIIb. Exemplary of such are those where the modifications that increase binding to FcγRIIb are selected from among one or more of S267E, N297A, L328F, L351S, T366R, L368H, P395K, S267E/L328F and L351S/T366R/L368H/P395K, by EU numbering.

[0202] The constructs provided herein can be multi-specific in that they interact with two or more targets. Exemplary of such multi-specific constructs are those are multi-specific TNFR1 inhibitor/TNFR2 agonist constructs and are of any of the following formulae:

(TNFR1 inhibitor)ₙ-Linker (L)ₚ-(TNFR2 agonist)_{q}, or

(TNFR1 inhibitor)ₙ-Linker (L)ₚ-(TNFR2 agonist)_{q}, or

(TNFR1 inhibitor)ₙ-(TNFR2 agonist)_{q}-Linker (L)ₚ, or

(TNFR2 agonist)_{q}-(TNFR1 inhibitor)ₙ-Linker (L)ₚ, or (Formula I)

any of the above, comprising an optional activity modifier, where: n=1 or 2, p=1, 2, or 3, and q=1 or 2; the TNFR1 inhibitor interacts with TNFR1 to inhibit its activity; an activity modifier is a moiety that modulates or alters the activity or the pharmacological property of the construct compared to the construct in the absence of the activity modifier; and the linker, for example, increases solubility of the construct, or increases flexibility, or alters steric effects of the construct. These constructs include those that are multi-specific TNFR1 inhibitor/TNFR2 agonist constructs, where: the TNFR1 inhibitor selectively inhibits or antagonizes TNFR1 signaling without inhibiting or antagonizing TNFR2 signaling; the TNFR1 inhibitor does not interfere with the activation or agonism of TNFR2; the TNFR2 agonist selectively activates or agonizes TNFR2 signaling without activating or agonizing TNFR1 signaling; and the TNFR2 agonist does not interfere with the inhibition or antagonism of TNFR1. Exemplary of such constructs are those of a)-c) as follows:

[0203] a) the TNFR1 inhibitor is selected from among:
[0204] i) an antigen-binding fragment of a human anti-TNFR1 antagonist monoclonal antibody selected from H398 or ATROSAB or a polypeptide with a sequence having at least 95% sequence identity therewith; or
[0205] ii) the domain antibody (dAb) of any of SEQ ID NOs:52-672, or the scFv of any of SEQ ID NOs:673-678, or the Fab of any of SEQ ID NOs:679-682, or the nanobody of SEQ ID NO: 683 or 684, or the TNF mutein of any of SEQ ID NOs:701-703, or a polypeptide with a sequence that has at least 95% sequence identity with any of the preceding polypeptides, and is a TNFR1 inhibitor; or
[0206] iii) a dominant-negative tumor necrosis factor (DN-TNF) or TNF mutein comprising a soluble TNF molecule, with one or more amino acid replacements that confer selective inhibition of TNFR1 and are selected from among:
   [0207] V1M, L29S, L29G, L29Y, R31C, R31E, R31N, R32Y, R32W, C69V, A84S, V85T, S86T, Y87H, Q88N, T89Q, I97T, C101A, A145R, E146R, L29S/R32W, L29S/S86T, R32W/S86T, L29S/R32W/S86T, R31N/R32T, R31E/S86T, R31N/R32T/S86T, I97T/A145R, V1M/R31C/C69V/Y87H/C101A/A145R, and A84S/V85T/S86T/Y87H/Q88N/T89Q, with reference to the sequence of soluble TNF, set forth in SEQ ID NO:2;

[0208] b) the linker is selected from:
[0209] i) a GS linker selected from (GlySer)ₙ, where n=1-10; (GlySer₂); (Gly₄Ser)ₙ, where n=1-10; (Gly₃Ser)ₙ, where n=1-5; (SerGly₄)ₙ, where n=1-5; (GlySerSerGly)ₙ, where n=1-5; GSGGSSGG; GSSSGSGSGSSG; GSSSGSGSGSSGG; GGSSGG; GGSSGGSGGSSSG; GSSSGSGSGGSSSGSGSG; GGSSGGSSGGGSSGGSSG; and GSSSGS; and/or
[0210] ii) all or a portion of the hinge sequence of trastuzumab, corresponding to residues 219-233 of SEQ ID NO:26, or all or a portion of the hinge sequence of nivolumab, corresponding to residues 212-223 of SEQ ID NO:29; and
[0211] iii) an IgG1 or IgG4 Fc, wherein:
   [0212] the IgG1 Fc is selected from the IgG1 Fc of human IgG1, set forth in SEQ ID NO:10, or the IgG1 Fc of trastuzumab, set forth in SEQ ID NO:27;
   [0213] the IgG4 Fc is selected from the IgG4 Fc of human IgG4, set forth in SEQ ID NO:16, or the IgG4 Fc of nivolumab, set forth in SEQ ID NO:30; and
   [0214] optionally, the Fc includes one or more modifications to introduce knobs-into-holes, and/or increase or enhance neonatal Fc receptor (FcRn) recycling, and/or reduce or eliminate immune effector functions; and

[0215] c) the TNFR2 agonist is selected from:
[0216] i) an antigen-binding fragment that binds to one or more epitopes within human TNFR2 that is selected from among the epitopes set forth in SEQ ID NOs:839-865, 1202, and 1204; or
[0217] ii) an antigen-binding fragment of an agonistic human anti-TNFR2 antibody selected from MR2-1 or MAB2261; or
[0218] iii) a TNFR2-selective TNF mutein that is a soluble TNF variant comprising one or more TNFR2-selective mutations selected from among K65W, D143Y, D143F, D143N, D143E, D143W, D143V, A145R, A145H, A145K, A145F, A145W, E146Q, E146H, E146K, E146N, D143N/A145R, A145R/S147T, Q88N/T89S/A145S/E146A/S147D, Q88N/A145I/E146G/S147D, A145H/E146S/S147D, A145H/S147D, L29V/A145D/E146D/S147D, A145N/E146D/S147D, A145T/E146S/S147D, A145Q/E146D/S147D, A145T/E146D/S147D, A145D/E146G/S147D, A145D/S147D, A145K/E146D/S147T, A145R/E146T/S147D, A145R/S147T, E146D/S147D, D143V/F144L/A145S, S95C/G148C, and D143V/A145S, with reference to SEQ ID NO:2; or
[0219] iv) a single-chain TNFR2-selective TNF mutein trimer, comprising the mutations D143N/A145R, wherein the TNF muteins are linked by (GGGGS)ₙ, where n=1-5, or all or a portion of the stalk region of TNF (SEQ ID NO:812); or
[0220] v) a TNFR2-selective agonist comprising the formula:

MD-L1-TNFmut-L2-TNFmut-L3-TNFmut (Formula II); or

TNFmut-L1-TNFmut-L2-TNFmut-L3-MD (Formula III);
[0221] whereby MD is a multimerization domain; TNFmut is a TNFR2-selective TNF mutein; and L1, L2 and L3 are linkers that can be the same or different, and wherein:
[0222] the MD is selected from EHD2 (SEQ ID NO:808), MHD2 (SEQ ID NO:811), the trimerization domain of chicken tenascin C (TNC) (residues 110-139 of SEQ ID NO:804; SEQ ID NO:805), or the trimerization domain of human TNC (residues 110-139 of SEQ ID NO:806, SEQ ID NO:807);
   [0223] L1, L2 and L3 each are (GGGGS)ₙ, where n=1-5, or all or a portion of the stalk region of TNF (SEQ ID NO:812), or a mixture thereof; and
   [0224] the TNF muteins comprise the TNFR2-selective mutations D143N/A145R.

[0225] Other such constructs include those that are multi-specific TNFR1 antagonist/TNFR2 agonist constructs, where:

[0226] a) the TNFR1 inhibitor comprises a domain antibody (dAb) of any of SEQ ID NOs:52-672, or the scFv of any of SEQ ID NOs:673-678, or the Fab of any of SEQ ID NOs:679-682, or the nanobody of SEQ ID NO: 683 or 684, or the TNF mutein of any of SEQ ID NOs:701-703, or a sequence with at least or at least about 95% sequence identity thereto;

[0227] b) the linker comprises (GGGGS)₃, the polypeptide comprising the sequence SCDKTH (residues 222-227 of SEQ ID NO:26), and the Fc of trastuzumab; and

[0228] c) the TNFR2 agonist comprises a TNFR2-selective TNF mutein that is a soluble TNF variant comprising one or more TNFR2-selective mutations selected from among K65W, D143Y, D143F, D143N, D143E, D143W, D143V, A145R, A145H, A145K, A145F, A145W, E146Q, E146H, E146K, E146N, D143N/A145R, A145R/S147T, Q88N/T89S/A145S/E146A/S147D, Q88N/A145I/E146G/S147D, A145H/E146S/S147D, A145H/S147D, L29V/A145D/E146D/S147D, A145N/E146D/S147D, A145T/E146S/S147D, A145Q/E146D/S147D, A145T/E146D/S147D, A145D/E146G/S147D, A145D/S147D, A145K/E146D/S147T, A145R/E146T/S147D, A145R/S147T, E146D/S147D, D143V/F144L/A145S, S95C/G148C, and D143V/A145S, with reference to SEQ ID NO:2.

[0229] Other such multi-specific constructs are those where:

[0230] a) the TNFR1 inhibitor comprises a domain antibody (dAb) of any of SEQ ID NOs:52-672, or the scFv of any of SEQ ID NOs:673-678, or the Fab of any of SEQ ID NOs:679-682, or the nanobody of SEQ ID NO: 683 or 684, or the TNF mutein of any of SEQ ID NOs:701-703, or a sequence with at least or at least about 95% sequence identity thereto;

[0231] b) the linker comprises (GGGGS)₃, all or a portion of the hinge sequence of nivolumab, and the Fc of nivolumab; and

[0232] c) the TNFR2 agonist comprises a TNFR2-selective TNF mutein that is a soluble TNF variant comprising one or more TNFR2-selective mutations selected from among K65W, D143Y, D143F, D143N, D143E, D143W, D143V, A145R, A145H, A145K, A145F, A145W, E146Q, E146H, E146K, E146N, D143N/A145R, A145R/S147T, Q88N/T89S/A145S/E146A/S147D, Q88N/A145I/E146G/S147D, A145H/E146S/S147D, A145H/S147D, L29V/A145D/E146D/S147D, A145N/E146D/S147D, A145T/E146S/S147D, A145Q/E146D/S147D, A145T/E146D/S147D, A145D/E146G/S147D, A145D/S147D, A145K/E146D/S147T, A145R/E146T/S147D, A145R/S147T, E146D/S147D, D143V/F144L/A145S, S95C/G148C, and D143V/A145S, with reference to SEQ ID NO:2.

[0233] Other such multi-specific constructs are those where:

[0234] a) the TNFR1 inhibitor comprises a domain antibody (dAb) of any of SEQ ID NOs:52-672, or the scFv of any of SEQ ID NOs:673-678, or the Fab of any of SEQ ID NOs:679-682, or the nanobody of SEQ ID NO: 683 or 684, or the TNF mutein of any of SEQ ID NOs:701-703, or a sequence with at least or at least about 95% sequence identity thereto;

[0235] b) the linker comprises (GGGGS)₃, and the Fc of trastuzumab; and

[0236] c) the TNFR2 agonist comprises a TNFR2-selective TNF mutein that is a soluble TNF variant comprising one or more TNFR2-selective mutations selected from among K65W, D143Y, D143F, D143N, D143E, D143W, D143V, A145R, A145H, A145K, A145F, A145W, E146Q, E146H, E146K, E146N, D143N/A145R, A145R/S147T, Q88N/T89S/A145S/E146A/S147D, Q88N/A145I/E146G/S147D, A145H/E146S/S147D, A145H/S147D, L29V/A145D/E146D/S147D, A145N/E146D/S147D, A145T/E146S/S147D, A145Q/E146D/S147D, A145T/E146D/S147D, A145D/E146G/S147D, A145D/S147D, A145K/E146D/S147T, A145R/E146T/S147D, A145R/S147T, E146D/S147D, D143V/F144L/A145S, S95C/G148C, and D143V/A145S, with reference to SEQ ID NO:2.

[0237] Other such multi-specific constructs are those where:

[0238] a) the TNFR1 inhibitor comprises a domain antibody (dAb) of any of SEQ ID NOs:52-672, or the scFv of any of SEQ ID NOs:673-678, or the Fab of any of SEQ ID NOs:679-682, or the nanobody of SEQ ID NO: 683 or 684, or the TNF mutein of any of SEQ ID NOs:701-703, or a sequence with at least or at least about 95% sequence identity thereto;

[0239] b) the linker comprises (GGGGS)₃, and the Fc of nivolumab; and

[0240] c) the TNFR2 agonist comprises a TNFR2-selective TNF mutein that is a soluble TNF variant comprising one or more TNFR2-selective mutations selected from among K65W, D143Y, D143F, D143N, D143E, D143W, D143V, A145R, A145H, A145K, A145F, A145W, E146Q, E146H, E146K, E146N, D143N/A145R, A145R/S147T, Q88N/T89S/A145S/E146A/S147D, Q88N/A145I/E146G/S147D, A145H/E146S/S147D, A145H/S147D, L29V/A145D/E146D/S147D, A145N/E146D/S147D, A145T/E146S/S147D, A145Q/E146D/S147D, A145T/E146D/S147D, A145D/E146G/S147D, A145D/S147D, A145K/E146D/S147T, A145R/E146T/S147D, A145R/S147T, E146D/S147D, D143V/F144L/A145S, S95C/G148C, and D143V/A145S, and any combination of the preceding mutations, with reference to SEQ ID NO:2.

[0241] These multi-specific constructs can comprise a modified Fc, wherein the IgG Fc comprises one or more of the following modifications:

[0242] a) a modification(s) to introduce knobs-into-holes;

[0243] b) a modification(s) to increase or enhance neonatal Fc receptor (FcRn) recycling; and

[0244] c) a modification(s) to reduce or eliminate immune effector functions. Exemplary of the Fc that comprise knobs-into-holes modifications are:

[0245] the knob mutation is selected from among one or more of S354C, T366Y, T366W, and T394W by EU numbering; and

[0246] the hole mutation is selected from among one or more of Y349C, T366S, L368A, F405A, Y407T, Y407A, and Y407V by EU numbering.

[0247] Other examples are multi-specific constructs that comprise an Fc, such as where the Fc comprises modifications to increase or enhance FcRn recycling is/are selected from among one or more of T250Q, T250R, M252F, M252W, M252Y, S254T, T256D, T256E, T256Q, V259I, V308F, E380A, M428L, H433K, N434F, N434A, N434W, N434S, N434Y, Y436H, M252Y/T256Q, M252F/T256D, M252Y/S254T/T256E, H433K/N434F/Y436H, N434F/Y436H, T250Q/M428L, T250R/M428L, M428L/N434S, V259I/V308F, V259I/V308F/M428L, E294del/T307P/N434Y, and T256N/A378V/S383N/N434Y, by EU numbering. The Fc can comprise modifications to immune effector functions that are selected from among one or more of complement-dependent cytotoxicity (CDC), antibody-dependent cell-mediated cytotoxicity (ADCC) and antibody-dependent cell-mediated phagocytosis (ADCP). The Fc can comprise modification(s) to reduce or eliminate immune effector functions in IgG1 and/or IgG4:

[0248] in IgG1: L235E, L234A/L235A, L234E/L235F/P331S, L234F/L235E/P331S, L234A/L235A/P329G, L234A/L235A/G237A/P238S/H268A/A330S/P331S, G236R/L328R, G237A, E318A, D265A, E233P, N297A, N297Q, N297D, N297G, N297G/D265A, A330L, D270A, P329A, P331A, K322A, V264A, and F241A, by EU numbering; and/or

[0249] in IgG4: L235E, F234A/L235A, S228P/L235E, and S228P/F234A/L235A, by EU numbering.

[0250] The IgG Fc can comprise one or more of the following modifications:

[0251] a) a modification(s) to introduce knobs-into-holes, wherein:
[0252] the knob mutation is selected from among one or more of S354C, T366Y, T366W, and T394W by EU numbering; and
[0253] the hole mutation is selected from among one or more of Y349C, T366S, L368A, F405A, Y407T, Y407A, and Y407V by EU numbering;

[0254] b) a modification(s) to increase or enhance neonatal Fc receptor (FcRn) recycling, wherein the modification is selected from among one or more of:
[0255] T250Q, T250R, M252F, M252W, M252Y, S254T, T256D, T256E, T256Q, V259I, V308F, E380A, M428L, H433K, N434F, N434A, N434W, N434S, N434Y, Y436H, M252Y/T256Q, M252F/T256D, M252Y/S254T/T256E, H433K/N434F/Y436H, N434F/Y436H, T250Q/M428L, T250R/M428L, M428L/N434S, V259I/V308F, V259I/V308F/M428L, E294del/T307P/N434Y, and T256N/A378V/S383N/N434Y, by EU numbering; and

[0256] c) a modification(s) to increase or enhance immune effector functions, wherein:
[0257] the immune effector functions are selected from among one or more of CDC, ADCC and ADCP; and
[0258] the modification(s) in to increase or enhance immune effector functions is selected from among one or more of:
   [0259] in IgG1: S239D, I332E, S239D/I332E, S239D/A330L/I332E, S298A/E333A/K334A; F243L/R292P/Y300L/V305I/P396L; L235V/F243L/R292P/Y300L/P396L; F243L/R292P/Y300L; L234Y/G236W/S298A in the first heavy chain and S239D/A330L/I332E in the second heavy chain; L234Y/L235Q/G236W/S239M/H268D/D270E/S298A in the first heavy chain and D270E/K326D/A330M/K334E in the second heavy chain; A327Q/P329A; D265A/S267A/H268A/D270A/K326A/S337A; T256A/K290A/S298A/E333A/K334A; G236A; G236A/I332E; G236A/S239D/I332E; G236A/S239D/A330L/I332E; introduction of a biantennary glycan at residue N297; introduction of an afucosylated glycan at residue N297; K326W; K326A; E333A; K326A/E333A; K326W/E333 S; K326M/E333 S; K222W/T223W; K222W/T223W/H224W; D221W/K222W; C220D/D221C; C220D/D221C/K222W/T223W; H268F/S324T; S267E; H268F; S324T; S267E/H268F/S324T; G236A/I332E/S267E/H268F/S324T; E345R; and E345R/E430G/S440Y; by EU numbering.

[0260] Other of such multi-specific constructs are those where: the construct that comprises an IgG1 Fc that is modified to increase binding to the inhibitory Fcγ receptor (FcγR) FcγRIIb. Exemplary of such are those where the modifications that increase binding to FcγRIIb are selected from among one or more of S267E, N297A, L328F, L351S, T366R, L368H, P395K, S267E/L328F and L351S/T366R/L368H/P395K, by EU numbering.

[0261] Also provided are constructs that are a multi-specific TNFR1 antagonist/TNFR2 agonist, the TNFR1 antagonist is monovalent; and the TNFR2 agonist is monovalent. Also provided are multi-specific constructs that are a multi-specific TNFR1 antagonist/TNFR2 agonist constructs, where the TNFR1 antagonist is monovalent; and the TNFR2 agonist is bivalent.

[0262] In some embodiments, the multi-specific constructs are multi-specific TNFR1 antagonist/TNFR2 agonist constructs, where:

[0263] a) the TNFR1 antagonist is selected from:
[0264] i) an antigen-binding fragment of a human anti-TNFR1 antagonist monoclonal antibody selected from H398 or ATROSAB; or
[0265] ii) the domain antibody (dAb) of any of SEQ ID NOs:52-672, or the scFv of any of SEQ ID NOs:673-678, or the Fab of any of SEQ ID NOs:679-682, or the nanobody of SEQ ID NO: 683 or 684, or the TNF mutein of any of SEQ ID NOs:701-703, or a sequence with at least or at least about 95% sequence identity thereto; or
[0266] iii) a dominant-negative tumor necrosis factor (DN-TNF) or TNF mutein comprising a soluble TNF molecule, with one or more amino acid replacements that confer selective inhibition of TNFR1 and are selected from among:
   [0267] V1M, L29S, L29G, L29Y, R31C, R31E, R31N, R32Y, R32W, C69V, A84S, V85T, S86T, Y87H, Q88N, T89Q, I97T, C101A, A145R, E146R, L29S/R32W, L29S/S86T, R32W/S86T, L29S/R32W/S86T, R31N/R32T, R31E/S86T, R31N/R32T/S86T, I97T/A145R, V1M/R31C/C69V/Y87H/C101A/A145R, and A84S/V85T/S86T/Y87H/Q88N/T89Q, with reference to the sequence of soluble TNF, set forth in SEQ ID NO:2;

[0268] b) the linker is a branched chain PEG molecule that is at least or at least about 30 kDa in size; and

[0269] c) the TNFR2 agonist is selected from:
[0270] i) an antigen-binding fragment that binds to one or more epitopes within human TNFR2 that is selected from among the epitopes set forth in SEQ ID NOs:839-865, 1202 and 1204; or
[0271] ii) an antigen-binding fragment of an agonistic human anti-TNFR2 antibody selected from MR2-1 or MAB2261; or
[0272] iii) a TNFR2-selective TNF mutein that is a soluble TNF variant comprising one or more TNFR2-selective mutations selected from among K65W, D143Y, D143F, D143N, D143E, D143W, D143V, A145R, A145H, A145K, A145F, A145W, E146Q, E146H, E146K, E146N, D143N/A145R, A145R/S147T, Q88N/T89S/A145S/E146A/S147D, Q88N/A145I/E146G/S147D, A145H/E146S/S147D, A145H/S147D, L29V/A145D/E146D/S147D, A145N/E146D/S147D, A145T/E146S/S147D, A145Q/E146D/S147D, A145T/E146D/S147D, A145D/E146G/S147D, A145D/S147D, A145K/E146D/S147T, A145R/E146T/S147D, A145R/S147T, E146D/S147D, D143V/F144L/A145S, S95C/G148C, and D143V/A145S, with reference to SEQ ID NO:2; or
[0273] iv) a single-chain TNFR2-selective TNF mutein trimer, comprising the mutations D143N/A145R, wherein the TNF muteins are linked by (GGGGS)ₙ, where n=1-5, or all or a portion of the stalk region of TNF (SEQ ID NO:812); or
[0274] v) a TNFR2-selective agonist comprising the formula:

MD-L1-TNFmut-L2-TNFmut-L3-TNFmut (Formula II); or

TNFmut-L1-TNFmut-L2-TNFmut-L3-MD (Formula III);
[0275] whereby MD is a multimerization domain; TNFmut is a TNFR2-selective TNF mutein; and L1, L2 and L3 are linkers that can be the same or different, and wherein:
   [0276] the MD is selected from EHD2 (SEQ ID NO:808), MHD2 (SEQ ID NO:811), the trimerization domain of chicken tenascin C (TNC) (residues 110-139 of SEQ ID NO:804; SEQ ID NO:805), or the trimerization domain of human TNC (residues 110-139 of SEQ ID NO:806, SEQ ID NO:807);
   [0277] L1, L2 and L3 each are (GGGGS)ₙ, where n=1-5, or all or a portion of the stalk region of TNF (SEQ ID NO:812), or a mixture thereof; and
   [0278] the TNF muteins comprise the TNFR2-selective mutations D143N/A145R.

[0279] Also provided are multi-specific constructs where each of the TNFR1 antagonist and TNFR2 agonist is monovalent. Also provided are such constructs where the TNFR1 antagonist is monovalent, and the TNFR2 agonist is bivalent.

[0280] The constructs provided herein can be used for treatments and uses for treatment of various diseases, disorders, and conditions. Provided are the multi-specific constructs that are multi-specific TNFR1 antagonist/TNFR2 agonist, for use for the treatment of a chronic inflammatory, autoimmune, neurodegenerative, demyelinating or respiratory disease or disorder, or a disease, condition or disorder characterized by overexpression of TNF or deregulated TNFR1 signaling in its etiology. Uses of multi-specific TNFR1 antagonist/TNFR2 agonist constructs for the treatment of a chronic inflammatory, autoimmune, neurodegenerative, demyelinating or respiratory disease or disorder, or a disease, condition or disorder characterized by overexpression of TNF or deregulated TNFR1 signaling in its etiology are provided.

[0281] Also provided are compositions, comprising a construct of any of the constructs provided herein in a pharmaceutically acceptable carrier or vehicle. These compositions can be used for or in methods of treatment of diseases, disorders, and conditions, such as, but not limited to, a chronic inflammatory, autoimmune, neurodegenerative, demyelinating or respiratory disease or disorder, and a disease, condition or disorder characterized by overexpression of TNF or deregulated TNFR1 signaling in its etiology. Exemplary diseases, disorders, and conditions, are inflammatory, autoimmune, neurodegenerative, demyelinating or respiratory diseases or disorders, and diseases, disorders, and conditions characterized by overexpression of TNF or deregulated TNFR1 signaling in its etiology. These include diseases, disorders, and conditions selected from: rheumatoid arthritis (RA), psoriasis, psoriatic arthritis, juvenile idiopathic arthritis (JIA), spondyloarthritis, ankylosing spondylitis, Crohn's disease, ulcerative colitis, inflammatory bowel disease (IBD), uveitis, fibrotic diseases, endometriosis, lupus, multiple sclerosis (MS), congestive heart failure, cardiovascular disease, myocardial infarction (MI), atherosclerosis, metabolic diseases, cytokine release syndrome, septic shock, sepsis, acute respiratory distress syndrome (ARDS), severe acute respiratory syndrome (SARS), SARS-CoV-2, influenza, acute and chronic neurodegenerative diseases, demyelinating diseases and disorders, stroke, Alzheimer's disease, Parkinson's disease, Behçet's disease, Dupuytren's disease, Tumor Necrosis Factor Receptor-Associated Periodic Syndrome (TRAPS), pancreatitis, type I diabetes, chronic obstructive pulmonary disease (COPD), chronic bronchitis, emphysema, graft rejection, graft versus host disease (GvHD), lung inflammation, pulmonary diseases and conditions, asthma, cystic fibrosis, idiopathic pulmonary fibrosis, acute fulminant viral or bacterial infections, pneumonia, genetically inherited diseases with TNF/TNFR1 as the causative pathologic mediator, periodic fever syndrome, or cancer. In particular, constructs provided herein, such as, but not limited to, the TNFR1 antagonist constructs, can be used in uses, methods of treatment, and compositions for the treatment of rheumatoid arthritis.

[0282] Also provided herein are constructs that are TNFR2 antagonist constructs that comprises a TNFR2 antagonist, and optionally a linker and optionally an activity modifier. Such constructs, for example, have formula 5:

(TNFR2 antagonist)ₙ-linkerₚ-(activity modifier)_{q}, or

linkerₚ-(activity modifier)_{q}-(TNFR2 antagonist)ₙ, wherein:

[0283] each of n and q is an integer, and each is independently 1, 2, or 3;

[0284] p is 0, 1, 2 or 3;

[0285] a TNFR2 antagonist is a molecule that interacts with TNFR2 to inhibit (antagonize) its activity TNFR2 to thereby inhibit the proliferation of and/or induce the death of Tregs, and also can inhibit the proliferation of and induce the death of TNFR2-expressing tumor cells;

[0286] an activity modifier is a moiety that modulates or alters the activity or the pharmacological property of the construct compared to the construct in the absence of the activity modifier; and

[0287] a linker increases flexibility of the construct, and/or moderates or reduces steric effects of the construct or its interaction with a receptor, and/or increases solubility in aqueous media of the construct.

[0288] In these constructs, each of the activity modifier and linker is as defined and described for the constructs above and below. They can be used in the methods of treatments and uses, and in pharmaceutical compositions.

[0289] The TNFR2 antagonist can be used for different diseases, disorders, and conditions, such as to reduce and/or inhibit the proliferation of myeloid-derived suppressor cells (MDSCs); and/or induce apoptosis within MDSCs, by binding TNFR2 expressed on the surface of MDSCs present in the tumor microenvironment; and/or induce the expansion of T effector cells, including cytotoxic CD8⁺ T cells, via the inhibition of Treg expansion and activity. The TNFR2 antagonists in the constructs include an antibody, antigen-binding fragment thereof, or single chain antibody that bind to epitopes within human TNFR2 that contain one or more of the residues KCRPG (corresponding to residues 142-146 of SEQ ID NO:4), or a larger epitope, containing residues 130-149, 137-144 or 142-149, or at least 5 continuous or discontinuous residues within these epitopes, for example, and do not bind to the epitope containing residues KCSPG (corresponding to residues 56-60 of SEQ ID NO:4); or that binds to the TNFR2 epitope PECLSCGS (corresponding to residues 91-98 of SEQ ID NO:4), RICTCRPG (corresponding to residues 116-123 of SEQ ID NO:4), CAPLRKCR (corresponding to residues 137-144 of SEQ ID NO:4), LRKCRPGFGVA (corresponding to residues 140-150 of SEQ ID NO:4), and/or VVCKPCAPGTFSN (corresponding to residues 159-171 of SEQ ID NO:4), and/or an epitope containing at least 5 continuous or discontinuous residues within residues 75-128, 86-103, 111-128, or 150-190 of SEQ ID NO:4. For example, the antibody, fragment thereof, or single chain form thereof binds to an epitope containing one or more residues of the KCRPG sequence (SEQ ID NO:840), with an affinity that is at least 10-fold greater than the affinity of the same antibody or antigen-binding fragment for a peptide that contains the KCSPG sequence of human TNFR2 (SEQ ID NO:839). In some embodiments of the TNFR2 antagonist constructs, the TNFR2 antagonist is an antibody or fragment or single chain form of an antibody selected from among:

[0290] TNFRAB1 (see, SEQ ID NOs:1212 and 1213 for the sequences of the heavy and light chains of TNFRAB1, respectively), TNFRAB2 and TNFR2A3 (see, e.g., U.S. Patent Publication No. 2019/0144556 for descriptions of these antibodies);

[0291] antibodies and antibody fragments and single chain forms that contain the CDR-H3 sequence of TNFRAB1 (QRVDGYSSYWYFDV; corresponding to residues 99-112 of SEQ ID NO:1212), TNFRAB2 (ARDDGSYSPFDYWG; SEQ ID NO:1217) or TNFR2A3 (ARDDGSYSPFDYFG; SEQ ID NO:1223), or a CDR-H3 sequence with at least about 85% sequence identity thereto. TNFRAB1, for example, that specifically binds residues 130-149, containing residues KCRPG of TNFR2, with a 40-fold higher affinity than residues 48-67, containing residues KCSPG of TNFR2. In some embodiments, the TNFR2 antagonist binds to one or more epitopes in TNFR2 selected from among:

[0292] the epitope containing residues 137-144 (CAPLRKCR; SEQ ID NO:851);

[0293] the epitope that includes one or more residues within positions 80-86 (DSTYTQL; SEQ ID NO:1247), 91-98 (PECLSCGS; SEQ ID NO:1248), and/or 116-123 (RICTCRPG; SEQ ID NO:1249) of human TNFR2; and

[0294] an epitope to which TNFR2A3 selected from a first epitope includes residues 140-150 of human TNFR2 (LRKCRPGFGVA; SEQ ID NO:1463) and contains the KCRPG motif, and/or a second epitope that contains residues 159-171 of human TNFR2 (VVCKPCAPGTFSN; SEQ ID NO:1464).

[0295] In some embodiments, the TNFR2 antagonist in the construct is an antibody, fragment thereof, or single chain form thereof that contains one or more of the CDR-H1 amino acids with the sequences set forth in any of SEQ ID NOs: 1214, 1215, and 1231-1233, the CDR-H2 sequences set forth in any of SEQ ID NOs: 1216, 1224, and 1230, the CDR-H3 sequences set forth in any of SEQ ID NOs: 1217, 1223, and 1225-1229, and/or the CDR-H3 of TNFRAB1, corresponding to residues 99-112 of SEQ ID NO:1212; the CDR-L1 sequences set forth in any of SEQ ID NOs: 1218 and 1234-1236, and/or the CDR-L1 sequence of TNFRAB1, corresponding to residues 24-33 of SEQ ID NO:1213; the CDR-L2 sequences set forth in any of SEQ ID NOs: 1219, 1220, 1237 and 1238, or the CDR-L2 sequence of TNFRAB1, corresponding to residues 49-55 of SEQ ID NO:1213; and/or the CDR-L3 sequences set forth in any of SEQ ID NOs: 1221, 1222, and 1241-1244, or the CDR-L3 sequence of TNFRAB1, corresponding to residues 88-96 of SEQ ID NO:1213; and/or CDR-H1 and CDR-H2 sequences of the consensus sequence of a human antibody heavy chain variable domain of SEQ ID NO:1245 replaced with the corresponding CDR sequences of a phenotype-neutral, TNFR2-specific antibody, and/or the CDR-L1, CDR-L2 and CDR-L3 sequences of the sequence of a human antibody light chain variable domain of SEQ ID NO:1246 replaced with the corresponding CDR sequences of a phenotype-neutral, TNFR2-specific antibody, to produce humanized, antagonistic TNFR2 antibodies. For example, the construct comprises a TNFR2 antagonist that specifically binds to an epitopes within TNFR2 set forth in any one of SEQ ID NOs:1247-1464. In some embodiments, the TNFR2 antagonist specifically binds to an epitope(s) selected from among:

[0296] (a) one or more epitopes within human TNFR2 that contain one or more of the residues KCRPG corresponding to residues 142-146 of SEQ ID NO:4, or a larger epitope, containing residues 130-149, 137-144 or 142-149, or at least 5 continuous or discontinuous residues within these epitopes, and do not bind to the epitope containing residues KCSPG corresponding to residues 56-60 of SEQ ID NO:4; and/or

[0297] (b) one or more TNFR2 epitopes comprising the sequence of amino acids comprising:

[0298] PECLSCGS corresponding to residues 91-98 of SEQ ID NO:4, and/or RICTCRPG corresponding to residues 116-123 of SEQ ID NO:4, and/or

[0299] CAPLRKCR corresponding to residues 137-144 of SEQ ID NO:4, and/or

[0300] LRKCRPGFGVA corresponding to residues 140-150 of SEQ ID NO:4, and/or

[0301] VVCKPCAPGTFSN corresponding to residues 159-171 of SEQ ID NO:4, and/or

[0302] an epitope containing at least 5 continuous or discontinuous residues within residues 75-128, 86-103, 111-128, or 150-190 of SEQ ID NO:4.

[0303] In some embodiments, the TNFR2 antagonist construct comprises a TNFR2 antagonist that is a small molecule. For example, the TNFR2 antagonist is thalidomide or an analog thereof, such as lenalidomide and pomalidomide.

[0304] In some embodiments, the TNFR2 antagonist construct comprises a TNFR2 antagonist that that reduces FoxP3 expression and inhibits the suppressive activity of Tregs. Exemplary of such antagonists is a histone deacetylase inhibitor that reduces FoxP3 expression and inhibits the suppressive activity of Tregs. Exemplary of such inhibitor is panobinostat or cyclophosphamide or Triptolide.

[0305] The TNFR2 constructs can be used in methods of treatment for and uses for treating infectious diseases, and for treating cancers that express TNFR2. Exemplary of such cancers is a cancer selected from among: T cell lymphoma, such as Hodgkin's lymphoma and cutaneous non-Hodgkin's lymphoma, ovarian cancer, colon cancer, multiple myeloma, renal cell carcinoma, breast cancer, cervical cancer, endometrial cancer, glioma, head and neck cancer, liver cancer, and lung cancer.

[0306] Provided are constructs that are growth factor traps (GFTs). The growth factor trap constructs contain two different extracellular domains (ECDs) of a ligand, and a multimerization domain as an activity modifier, where the multimerization domain is linked to an ECD directly or via a linker. One or both of the ECDs and/or the multimerization domain in the growth fact trap constructs are modified in their primary amino acid sequences to alter binding of the ECD(s) or the multimerization domain. In some embodiments, in the growth factor trap constructs provided herein the multimerization domain is a modified Fc. For example, in a growth factor trap construct herein the multimerization domain is a modified Fc or IgG Fc that comprises one or more modifications, such as a modification(s) to introduce knobs-into-holes; a modification(s) to increase or enhance neonatal Fc receptor (FcRn) recycling; and a modification(s) to reduce or eliminate immune effector functions. In some examples of the growth factor trap constructs herein, the construct contains an Fc where the Fc comprises knobs-into-holes modifications, wherein:

[0307] the knob modification is selected from among one or more of S354C, T366Y, T366W, and T394W, by EU numbering; and

[0308] the hole modification is selected from among one or more of Y349C, T366S, L368A, F405A, Y407T, Y407A, and Y407V, by EU numbering.

[0309] In some embodiments, the Fc in a growth factor trap construct herein comprises one or more modifications to increase or enhance FcRn recycling where the modification(s) is/are selected from among one or more of T250Q, T250R, M252F, M252W, M252Y, S254T, T256D, T256E, T256Q, V259I, V308F, E380A, M428L, H433K, N434F, N434A, N434W, N434S, N434Y, Y436H, M252Y/T256Q, M252F/T256D, M252Y/S254T/T256E, H433K/N434F/Y436H, N434F/Y436H, T250Q/M428L, T250R/M428L, M428L/N434S, V259I/V308F, V259I/V308F/M428L, E294del/T307P/N434Y, and T256N/A378V/S383N/N434Y, by EU numbering.

[0310] In some embodiments, the Fc in a growth factor trap construct herein comprises immune effector functions that are selected from among one or more of complement-dependent cytotoxicity (CDC), antibody-dependent cell-mediated cytotoxicity (ADCC) and antibody-dependent cell-mediated phagocytosis (ADCP).

[0311] In some embodiments, the IgG1 and/or IgG4 in a growth factor trap construct herein comprises one or more modifications to reduce or eliminate immune effector functions; modifications in IgG1 can be selected from among L235E, L234A/L235A, L234E/L235F/P331S, L234F/L235E/P331S, L234A/L235A/P329G, L234A/L235A/G237A/P238S/H268A/A330S/P331S, G236R/L328R, G237A, E318A, D265A, E233P, N297A, N297Q, N297D, N297G, N297G/D265A, A330L, D270A, P329A, P331A, K322A, V264A, and F241A, by EU numbering; modifications in IgG4 can be selected from among L235E, F234A/L235A, S228P/L235E, and S228P/F234A/L235A, by EU numbering.

[0312] In some embodiments, the IgG Fc in a growth factor trap construct herein comprises one or more of the following modifications:

[0313] a) a modification(s) to introduce knobs-into-holes, wherein:
[0314] the knob mutation is selected from among one or more of S354C, T366Y, T366W, and T394W by EU numbering; and
[0315] the hole mutation is selected from among one or more of Y349C, T366S, L368A, F405A, Y407T, Y407A, and Y407V by EU numbering;

[0316] b) a modification(s) to increase or enhance neonatal Fc receptor (FcRn) recycling, wherein the modification is selected from among one or more of:
[0317] T250Q, T250R, M252F, M252W, M252Y, S254T, T256D, T256E, T256Q, V259I, V308F, E380A, M428L, H433K, N434F, N434A, N434W, N434S, N434Y, Y436H, M252Y/T256Q, M252F/T256D, M252Y/S254T/T256E, H433K/N434F/Y436H, N434F/Y436H, T250Q/M428L, T250R/M428L, M428L/N434S, V259I/V308F, V259I/V308F/M428L, E294del/T307P/N434Y, and T256N/A378V/S383N/N434Y, by EU numbering; and

[0318] c) a modification(s) to increase or enhance immune effector functions, wherein:
[0319] the immune effector functions are selected from among one or more of CDC, ADCC and ADCP; and
[0320] the modification(s) in to increase or enhance immune effector functions is selected from among one or more of:
   [0321] in IgG1: S239D, I332E, S239D/I332E, S239D/A330L/I332E, S298A/E333A/K334A; F243L/R292P/Y300L/V305I/P396L; L235V/F243L/R292P/Y300L/P396L; F243L/R292P/Y300L; L234Y/G236W/S298A in the first heavy chain and S239D/A330L/I332E in the second heavy chain; L234Y/L235Q/G236W/S239M/H268D/D270E/S298A in the first heavy chain and D270E/K326D/A330M/K334E in the second heavy chain; A327Q/P329A; D265A/S267A/H268A/D270A/K326A/S337A; T256A/K290A/S298A/E333A/K334A; G236A; G236A/I332E; G236A/S239D/I332E; G236A/S239D/A330L/I332E; introduction of a biantennary glycan at residue N297; introduction of an afucosylated glycan at residue N297; K326W; K326A; E333A; K326A/E333A; K326W/E333S; K326M/E333S; K222W/T223W; K222W/T223W/H224W; D221W/K222W; C220D/D221C; C220D/D221C/K222W/T223W; H268F/S324T; S267E; H268F; S324T; S267E/H268F/S324T; G236A/I332E/S267E/H268F/S324T; E345R; and E345R/E430G/S440Y; by EU numbering.

[0322] In any of the provided growth factor traps herein, the construct comprises an IgG1 Fc that modified to increase binding to the inhibitory Fcγ receptor (FcγR) FcγRIIb. For example, in embodiments, the modifications that increase binding to FcγRIIb are selected from among one or more of S267E, N297A, L328F, L351S, T366R, L368H, P395K, S267E/L328F and L351S/T366R/L368H/P395K, by EU numbering.

[0323] In some embodiments, the ECD in the growth factor trap construct comprises one or more modifications. Exemplary ECDs in the growth factor trap construct herein comprise all or a portion of the extracellular domain (ECD) of a member of the HER family. Exemplary members of the HER family include EGFR/HER1, HER2, HER3 and HER4.

[0324] In some embodiments, a growth factor trap construct herein comprises a linker that links one or both ECDs to a multimerization domain. For example, the linker in the growth factor trap construct can provide flexibility, increase solubility, and/or relieve or reduce steric hindrance or Van der Waals interactions. Exemplary of such linkers comprise a hinge region or a linker comprising G and S residues. Other linkers for inclusion in the growth factor trap construct herein have a sequence set forth in any of SEQ ID NOs: 812-834 or is a PEG moiety linker. In other examples, the linker is selected from: i) a GS linker selected from (GlySer)n, where n=1-10; (GlySer₂); (Gly4Ser)ₙ, where n=1-10; (Gly₃Ser)ₙ, where n=1-5; (SerGly₄)n, where n=1-5; (GlySerSerGly)ₙ, where n=1-5; GSGGSSGG; GSSSGSGSGSSG; GSSSGSGSGSSGG; GGSSGG; GGSSGGSGGSSSG; GSSSGSGSGGSSSGSGSG; GGSSGGSSGGGSSGGSSG; and GSSSGS; and/or ii) all or a portion of the hinge sequence of trastuzumab, corresponding to residues 219-233 of SEQ ID NO:26, or all or a portion of the hinge sequence of nivolumab, corresponding to residues 212-223 of SEQ ID NO:29; and iii) an IgG1 or IgG4 Fc, wherein: the IgG1 Fc is selected from the IgG1 Fc of human IgG1, set forth in SEQ ID NO:10, or the IgG1 Fc of trastuzumab, set forth in SEQ ID NO:27; and the IgG4 Fc is selected from the IgG4 Fc of human IgG4, set forth in SEQ ID NO:16, or the IgG4 Fc of nivolumab, set forth in SEQ ID NO:30

[0325] For example, in growth factor trap constructs that contain a linker and an Fc, the Fc includes one or more modifications to introduce knobs-into-holes, and/or increase or enhance neonatal Fc receptor (FcRn) recycling, and/or reduce or eliminate immune effector functions. In some examples, where the growth factor trap construct contains a linker, the linker comprises all or a portion of the hinge sequence of nivolumab, corresponding to residues 212-223 of SEQ ID NO:29. For example, the construct containing a linker that comprises all or a portion of the hinge sequence of nivolumab, corresponding to residues 212-223 of SEQ ID NO:29 can comprise an IgG1 or IgG4 Fc. In such examples, the IgG1 Fc is selected from the IgG1 Fc of human IgG1, set forth in SEQ ID NO:10, or the IgG1 Fc of trastuzumab, set forth in SEQ ID NO:27; the IgG4 Fc is selected from the IgG4 Fc of human IgG4, set forth in SEQ ID NO:16, or the IgG4 Fc of nivolumab, set forth in SEQ ID NO:30; and optionally, the Fc includes one or more modifications to introduce knobs-into-holes, and/or increase or enhance neonatal Fc receptor (FcRn) recycling, and/or reduce or eliminate immune effector functions.

[0326] In exemplary growth factor trap constructs that contain a linker, the linker comprises all or a portion of the hinge sequence of trastuzumab, SCDKTH corresponding to residues 222-227 of SEQ ID NO:26 or up to the full sequence of the hinge region of trastuzumab, that contains or has the sequence EPKSCDKTHTCPPCP (corresponding to residues 219-233 of SEQ ID NO:26), or at least 5, 6, 7, 8, 9, 10, or 11 contiguous residues thereof, or residues ESKYGPPCPPCP corresponding to residues 212-223 of SEQ ID NO:29, or a sequence having at least 98% or 99% sequence identity thereto that is a linker. In constructs provided herein that are growth factor trap constructs and that comprise a linker, the linker can comprise the sequence SCDKTH, corresponding to residues 222-227 of SEQ ID NO:26; and/or the linker comprises a GS linker and all or a portion of the hinge sequence of trastuzumab, corresponding to residues EPKSCDKTHTCPPCP (corresponding to residues 219-233 of SEQ ID NO:26); and/or the linker comprises a GS linker and comprises the sequence SCDKTH, corresponding to residues 217-222 of SEQ ID NO:31.

[0327] In any of the growth factor trap constructs provided herein that contain a linker, in some examples the linker is selected from one or more of a linker that: comprises a GS linker and all or a portion of the hinge sequence of nivolumab, corresponding to residues 212-223 of SEQ ID NO:29; a linker that comprises (Gly₄Ser)₃; a linker that comprises (Gly₄Ser)₃ and SCDKTH (residues 217-222 of SEQ ID NO:31); a linker that comprises (Gly₄Ser)₃ and the hinge sequence of trastuzumab, corresponding to residues 219-233 of SEQ ID NO:26; a linker that comprises (Gly₄Ser)₃ and the hinge sequence of nivolumab, corresponding to residues 212-223 of SEQ ID NO:29.

[0328] In any of the growth factor trap constructs provided herein that contain a GS linker, in some examples the GS linker is (GGGGS)₃; and a multimerization domain that is IgG Fc is the Fc of trastuzumab or the Fc of nivolumab. Also provided herein are constructs that are growth factor trap constructs that comprise a GS linker selected from among (GlySer)ₙ, where n=1-10; (GlySer₂); (Gly₄Ser)ₙ, where n=1-10; (Gly₃Ser)ₙ, where n=1-5; (SerGly₄)ₙ, where n=1-5; (GlySerSerGly)ₙ, where n=1-5; GSGGSSGG; GSSSGSGSGSSG; GSSSGSGSGSSGG; GGSSGG; GGSSGGSGGSSSG; GSSSGSGSGGSSSGSGSG; GGSSGGSSGGGSSGGSSG; and GSSSGS; and also contain a second linker selected from among all or a portion of the hinge sequence of trastuzumab and all or a portion of the hinge sequence of nivolumab. In some of these constructs that contain a first GS linker and a second linker containing all or a portion of the hinge sequence of trastuzumab and all or a portion of the hinge sequence of nivolumab, the construct also comprises a half-life extending moiety that is an IgG Fc.

[0329] Any of the growth factor trap constructs provided herein also can comprise a half-life extending moiety, such as a half-life extending moiety that is an IgG Fc, a polyethylene glycol (PEG) molecule, or human serum albumin (HSA). In embodiments, where the growth factor trap construct comprises a half-life extending moiety that is an IgG Fc, the IgG Fc can be selected from an IgG1 and IgG4 Fc. In some examples, the IgG1 Fc is the Fc of trastuzumab, set forth in SEQ ID NO:27; or the IgG4 Fc is the Fc of nivolumab, set forth in SEQ ID NO:30. In some examples, where the construct comprises an Fc or more than one Fcs, the Fc is an Fc of human IgG1, set forth in SEQ ID NO:10; and/or is the IgG4 Fc is the Fc of human IgG4, set forth in SEQ ID NO:16.

[0330] Provided are constructs that are multi-specific, heterodimeric constructs, comprising a first ECD polypeptide and a second ECD polypeptide that each are linked directly or indirectly via the linker to the multimerization domain, wherein:

[0331] the first and second ECD polypeptides are different; and

[0332] the first and second ECD polypeptides are selected from an ECD that comprises an ECD selected from among:
[0333] the ECD of HER1/EGFR, corresponding to residues 1-621 of SEQ ID NO:41, or a portion thereof, or a variant thereof that has at least 95% or 98% sequence identity to SEQ ID NO:41;
[0334] the ECD polypeptide comprises the ECD of HER2, corresponding to residues 1-628 of SEQ ID NO:43, or a portion thereof, or a variant thereof that has at least 95% or 98% sequence identity to SEQ ID NO:43;
[0335] the ECD polypeptide comprises the ECD of HER3, corresponding to residues 1-621 of SEQ ID NO:45, or a portion thereof, or a variant thereof that has at least 95% or 98% sequence identity to SEQ ID NO:45; and
[0336] the ECD polypeptide comprises the ECD of HER4, corresponding to residues 1-625 of SEQ ID NO:47, or a portion thereof, or a variant thereof that has at least 95% or 98% sequence identity to SEQ ID NO:47; and

[0337] the portion or variant of each ECD can effect ligand binding, and/or can dimerize with a cell surface receptor. In embodiments that constructs are bi-specific, heterodimeric constructs, comprising a first ECD polypeptide and a second ECD polypeptide that each are linked directly or indirectly via the linker to the multimerization domain, wherein:

[0338] the first ECD polypeptide comprises the ECD of HER1/EGFR, corresponding to residues 1-621 of SEQ ID NO:41, or a portion thereof, or a variant thereof that has at least 95% or 98% sequence identity to SEQ ID NO:41;

[0339] and the second ECD polypeptide comprises the ECD of HER2, corresponding to residues 1-628 of SEQ ID NO:43, or a portion thereof, or a variant thereof that has at least 95% or 98% sequence identity to SEQ ID NO:43; or

[0340] the second ECD polypeptide comprises the ECD of HER3, corresponding to residues 1-621 of SEQ ID NO:45, or a portion thereof, or a variant thereof that has at least 95% or 98% sequence identity to SEQ ID NO:45; or

[0341] the second ECD polypeptide comprises the ECD of HER4, corresponding to residues 1-625 of SEQ ID NO:47, or a portion thereof, or a variant thereof that has at least 95% or 98% sequence identity to SEQ ID NO:47; and

[0342] the portion or variant of each ECD retains sufficient affinity for ligand binding, and/or to dimerize with a cell surface receptor. For example, the portion or variant of each ECD retains sufficient affinity for the respective cell surface target or ligand to bind thereto, wherein the affinity is at least 10% of the full-length ECD. The constructs can be multimeric, such as dimeric. The constructs comprise at least two different ECDs, such as heterodimers. As an example, the heterodimers comprise the ECD of EGFR and of HER3.

[0343] One or both of the ECDs can comprise amino acid modifications, such as insertions, and/or deletions, to alter a property of the ECD, such as to increase affinity and/or receptor dimerization activity, or other activity of the ECD. As an example, the ECD can be an EGFR (HER1) ECD and comprise the mutations T15S and G564S in the EGFR ECD subdomains I and IV, respectively, with reference to the sequence of the mature EGFR protein as set forth SEQ ID NO:41 or an allelic variant thereof, and Y246A in the HER3 ECD subdomain II, with reference to sequence of the mature HER3 protein as set forth in SEQ ID NO:45 or an allelic variant thereof. The ligand trap constructs can contain less than the full-length ECD of a HER protein, and contain at least a sufficient portion of subdomains I, II and III for ligand binding and receptor dimerization. The ECD can contain a sufficient portion of subdomains I and III for ligand binding, and/or contains a sufficient portion of the ECD to dimerize with a cell surface receptor, including a sufficient portion of subdomain II. For example, an ECD in the construct contains subdomains I, II and III and at least module 1 of domain IV. Exemplary constructs contain a first ECD that contains all or a portion of the ECD of HER1/EGFR, HER2, HER3 or HER4, and a second ECD from a different cell surface receptor (CSR). For example, provided are constructs in which the second ECD is different from the first and is from a CSR selected from among HER2, HER3, HER4, an insulin growth factor-1 receptor (IGF1-R), a vascular endothelial growth factor receptor (VEGFR, e.g., VEGFR1), a fibroblast growth factor receptor (FGFR, e.g., FGFR2 or FGFR4), a TNFR, a platelet-derived growth factor receptor (PDGFR), a hepatocyte growth factor receptor (HGFR), a tyrosine kinase with immunoglobulin-like and EGF-like domains 1 (TIE, e.g., TIE-1 or TEK (TIE-2)), a receptor for advanced glycation end products (RAGE), an Eph receptor, or a T-cell receptor. In some embodiments, the first ECD polypeptide comprises the full-length ECD of HER1/EGFR (corresponding to residues 1-621 of SEQ ID NO:41), or a portion thereof or allelic variant thereof having at least 95% or 98% sequence identity to SEQ ID NO:41 and retaining binding activity and/or dimerization activity. For example, the portion can be residues 1-501 of SEQ ID NO:41, which correspond to subdomains I-III and module 1 of domain IV, or a variant thereof having at least 95% or 98% sequence identity to residues 1-501 of SEQ ID NO:4I and retaining binding and/or dimerization activity. In embodiments, the second ECD polypeptide can comprise comprises the full-length ECD of HER3 corresponding to residues 1-621 of SEQ ID NO:45, or a portion thereof, or a variant thereof having at least 95% or 98% sequence identity to residues 1-501 of SEQ ID NO:45 and retaining binding and/or dimerization activity. In other embodiments, the portion has residues 1-500 of SEQ ID NO:45, which correspond to subdomains I-III and module 1 of domain IV, or a variant thereof having at least 95% or 98% sequence identity to residues 1-500 of SEQ ID NO:45 and retaining binding and/or dimerization activity, or, for example, the ECD portion contains at least a sufficient portion of subdomains I and III to bind to a ligand of the HER receptor, and a sufficient portion of the ECD to dimerize with a cell surface receptor, including a sufficient portion of subdomain II.

[0344] Provided are the growth factor ligand trap constructs in which at least one of the ECDs or multimerization domain or linker or combinations thereof are modified, where the first and second ECD polypeptides form a multimer that binds to additional ligands as compared to the first or second chimeric polypeptide alone, or homodimers thereof, and/or dimerizes with more cell surface receptors than the first or second chimeric polypeptide alone, or homodimers thereof. For example, at least one of the ECD domains or a portion or variant thereof, includes a modification that alters ligand binding, specificity or other activity or property compared to the unmodified ECD polypeptide, and generally, the multimerization domain and/or linker is modified to alter a property (as described above, and in the detailed description). Exemplary are constructs in which the first and second ECD polypeptides form a heterodimer that binds to HER1 ligands and to HER3 ligands.

[0345] Modifications of the ECD include those that alter ligand binding, specificity or another activity or property of the ECD or of full-length receptor containing such ECD, compared to the unmodified ECD or full-length receptor, whereby the heteromultimer exhibits the altered activity or property, such as ligand binding and/or specificity and/or dimerization activity. Exemplary of such constructs are those that comprise a HER1 ECD that contains a mutation in subdomain III that increases its affinity for a ligand other than EGF. Such increase in affinity is at least 2-fold, 10-fold, 100-fold, 1000-fold, 10⁴-fold, 10⁵-fold, 10⁶-fold. Exemplary of the constructs provided herein are those that are heterodimers containing a HER1 (EGFR) chimeric fusion polypeptide and a HER3 chimeric fusion polypeptide, wherein each chimeric fusion polypeptide comprises the ECD of the receptor linked to the Fc of human IgG1, optionally via a peptide linker. As noted above, the constructs can also, or generally also include modifications of the multimerization domain and/or a linker to alter properties of the resulting construct.

[0346] In these constructs, the C-terminus of an ECD polypeptide is linked to the N-terminus of the multimerization domain optionally the multimerization domain is IgG1 Fc or modified form thereof, including any modification described herein.

[0347] Exemplary of the growth factor ligand trap constructs are those that comprise a HER1 ECD and/or a HER ECD that is modified to have increased or altered ligand binding and/or biological activity. For example, where HER1 comprises S418F with reference to the sequence of the mature protein, set forth in SEQ ID NO:41, whereby the HER3 ligand NRG2-β stimulates HER1, and the resulting ECD binds to or interacts with at least two ligands, EGF for HER1, and NRG2-β for HER3, such as construct that comprises the ECD HER1 (EGFR), and the mutations T15S and G564S in the EGFR/HER1 ECD subdomains I and IV, respectively, with reference to the sequence of the mature EGFR protein (SEQ ID NO:41), and Y246A in the HER3 ECD subdomain II, with reference to the sequence of the mature HER3 protein (SEQ ID NO:45); and

[0348] the HER1 ECD comprises additional mutations selected from one or a combination of E330D/G588S, S193N/E330D/G588S, and T43K/S193N/E330D/G588S, with reference to the sequence of precursor HER1 (including the signal peptide) set forth in SEQ ID NO:40, and corresponding to E306D/G564S, S169N/E306D/G564S and T19K/S169N/E306D/G564S, with reference to the sequence of the mature HER1 polypeptide, set forth in SEQ ID NO:41, or a construct that comprises an EGFR (HER1):HER3 heterodimer, mutations T15S and G564S in the EGFR ECD subdomains I and IV, respectively, with reference to the sequence of the mature EGFR protein (SEQ ID NO:41 or an allelic variant that is SEQ ID NO:41 with N516K), and Y246A in the HER3 ECD subdomain II, with reference to sequence of the mature HER3 protein (SEQ ID NO:45). The constructs can include an Fc domain modified to enhance neonatal Fc receptor (FcRn) recycling, and/or effector functions.

[0349] The claims set forth in the application as filed are incorporated by reference into this Summary.

### BRIEF DESCRIPTION OF THE DRAWINGS

[0350] FIG. 1 depicts a plasmid map of the pCBL-1 expression plasmid containing the CMV promoter where TE19080L is the inserted fragment.

[0351] FIG. 2 sets forth an exemplary bi-specific construct—with a linker (part of a hinge region) and activity modifier joining two ligands, such as TNFR1 inhibitor (TNFR1 antagonist) and a TNFR2 agonist.

[0352] FIGS. 3A-3D depict exemplary PEG-centered multi-specific constructs, which are for presenting/providing two or more moieties that interact with one or more targets, or with one target at a plurality of sites. FIG. 3A depicts an exemplary bivalent construct. One of the circles is, for example, a polypeptide agonist, antagonist or a binding protein, such as an antibody or antigen-binding fragment thereof, or an aptamer (nucleic acid or peptide). The other circle represents polysaccharides or receptor ligands or other moieties that interact with a target of interest. The bivalent nature provides for clustering of targets for receptor activation. In embodiments provided herein, the targets include TNFR1 and TNFR2; and as described throughout the disclosure herein, moieties include TNFR1 inhibitors, such as moieties that inhibit TNFR1 signaling, and TNFR2 agonists or other moieties that are Treg expanders. FIG. 3B depicts a monovalent single ligand, such as CD3+, to prevent cytokine release syndrome, linked via the PEG moieties to the agonist, antagonist, or binding protein, which is bivalent for receptor clustering. Again exemplary targets include TNFR1 and/or TNFR2. FIG. 3C depicts a heterobifunctional PEG for crosslinking two different cell targeting agents, or two agents, such as trastuzumab and pertuzumab or portions thereof, that bind to different sites on the same receptor. This construct can be used, for example, to cluster a checkpoint control receptor for either stimulation or inhibition of an immune response, or to crosslink two different receptors to achieve suppression of receptor activity (i.e., CD3 vs CD450, or to deliver two different ligands, such as a stimulatory and a co-stimulatory ligand, to two different receptors on the same cells. FIG. 3D depicts a homobifunctional PEG for clustering identical receptors on the same or different cells, depending upon chain length, or to trap circulating disease target, such as a soluble receptor or ligand, such as TNF. Additionally in all of these embodiments additional PEG side chain, optionally linked to another reactive group or functional group, such as a serum half-life extending moiety, such as HSA, or an FcRn polypeptide, can be included in these constructs. The PEG moieties can be modified or replaced with moieties with similar properties for presentation of the binding moieties.

[0353] FIG. 4 depicts additional exemplary configurations and structures of PEG-centered constructs for displaying or providing binding moieties or reactive moieties, such as the TNFR1 inhibitors and/or the TNFR2 agonists as described herein.

[0354] FIG. 5 depicts additional exemplary configurations and structures of PEG-centered constructs for displaying or providing binding moieties or reactive moieties, such as the TNFR1 inhibitors and/or the TNFR2 agonists. X and Y can be ligands and reactive moieties.

[0355] FIG. 6 shows the effects of the exemplary construct designated Vhh-4 (see Example 6) on gene expression in THP1 cells that were stimulated with TNFα. These effects were compared to the effects on gene expression by Etanercept/Enbrel and adalimumab/Humira® for the ability to suppress TNF-induced gene expression of interleukin-6, IL-8 and TNF (three inflammatory cytokines). Controls (four bars on the left side of each panel) show the level of cytokine expression when cells are exposed to the inhibitors in the absence of added TNF. The four bars on the right side of each panel show the level of cytokine expression in the presence of TNF. The first bar on the right side of each panel shows relative TNF-induced gene expression of the respective cytokine (IL-6, IL-8, TNF) in the absence of inhibitor. The next bar, in each of the graphs, shows the relative level of cytokine expression in the presence of Vhh-4, the next bars show results in the in the presence of Etanercept/Enbrel®, and adalimumab/Humira®. TNF-induced gene expression of IL-6, IL-8 and TNF was reduced about 10-fold in each case, indicating that Vhh-4 is at least as potent as Etanercept/Enbrel® or adalimumab/Humira® (n=3; ±SEM; *p<0.05; **p<0.01; ***p<0.001).

### DETAILED DESCRIPTION

### Outline

[0356] A. DEFINITIONS
[0357] B. OVERVIEW OF CONSTRUCTS AND METHODS
[0358] C. TUMOR NECROSIS FACTOR (TNF) AND CHRONIC INFLAMMATORY AND AUTOIMMUNE DISEASES AND DISORDERS
   [0359] 1. Tumor Necrosis Factor (TNF)
      [0360] 2. Tumor Necrosis Factor Receptors (TNFRs)
      [0361] a. TNFR1
      [0362] b. TNFR2
   [0363] 3. Regulatory T Cells (Tregs) and Their Role in the Autoimmune Microenvironment
   [0364] 4. Autoimmune/Inflammatory Diseases Mediated by or involving TNF
      [0365] a. Arthritis
         [0366] i. Rheumatoid Arthritis and other types of arthritis
      [0367] b. Inflammatory Bowel Disease (IBD) and Uveitis
      [0368] c. Fibrotic Diseases
      [0369] d. Tumor Necrosis Factor Receptor-Associated Periodic Syndrome (TRAPS)/
      [0370] e. Other Diseases Mediated by or involving TNF
         [0371] i. Neurodegenerative Diseases
            [0372] a) Alzheimer's Disease
            [0373] b) Parkinson's Disease
            [0374] c) Multiple Sclerosis (MS)
         [0375] ii. Endometriosis
         [0376] iii. Cardiovascular Disease
         [0377] iv. Acute Respiratory Distress Syndrome (ARDS)
         [0378] v. Severe Acute Respiratory Syndrome (SARS) and COVID-19
[0379] D. THERAPIES FOR RHEUMATOID ARTHRITIS AND OTHER CHRONIC INFLAMMATORY AND AUTOIMMUNE DISEASES AND DISORDERS
   [0380] 1. Conventional Synthetic Disease Modifying Anti-Rheumatic Drugs (csDMARDs)
   [0381] 2. Anti-TNF Therapies/TNF Blockers
[0382] E. THERAPEUTICS FOR TARGETING TNFR1/TNFR2
   [0383] 1. TNFR1-Selective Antagonists
      [0384] a. TNFR1 antagonistic Antibodies
      [0385] b. Monovalent TNFR1 antagonistic Antibodies/Antibody Fragments
         [0386] i. Fab- and scFv-Based TNFR1 antagonists
         [0387] ii. Domain Antibody (dAb)-Based TNFR1 antagonists
            [0388] a) Anti-TNFR1 dAb-Anti-Albumin dAb Fusion Constructs
            [0389] b) Domain antibody fragments designated GSK1995057 and GSK2862277
         [0390] iii. Nanobodies (Nbs)
         [0391] iv. Anti-TNFR1 Nanobody-Anti-Albumin Nanobody Fusion Constructs
      [0392] c. Dominant-Negative Inhibitors of TNF (DN-TNFs)/TNF Muteins
   [0393] 2. TNFR2-Selective Agonists
      [0394] a. TNFR2 agonistic Antibodies
      [0395] b. TNFR2-Selective TNF Muteins and Fusions Thereof
   [0396] 3. Anti-TNFR2 Antagonistic Antibodies and Small Molecule Inhibitors
[0397] F. SELECTIVE TARGETING OF THE TNFR1 AND/OR TNFR2 AXIS
   [0398] 1. Selective Blockade of TNFR1 with TNFR1 antagonists
   [0399] 2. Selective Activation of TNFR2 with TNFR2 agonists
   [0400] 3. TNFR1 antagonist constructs, TNFR2 agonist constructs; Multi-Specific, Including Bi-Specific, TNFR1 Antagonist and TNFR2 Agonist Constructs
   [0401] 4. Components of the TNFR1 antagonist constructs, TNFR2 agonist constructs, and Multi-Specific, Including Bi-Specific, TNFR1 Antagonist/TNFR2 agonist constructs
      [0402] a. TNFR1 inhibitor moiety (TNFR1 antagonist)
      [0403] b. TNFR2 Agonist Constructs and TNFR2 Antagonist Constructs
      [0404] c. Linkers
         [0405] i. Peptide Linkers
            [0406] a) Flexible linkers
            [0407] b) Rigid linkers
         [0408] ii. Chemical Linkers
      [0409] d. Activity modifiers
         [0410] i. Modifications to the Fc portions
            [0411] a) Knobs-in-Holes
            [0412] b) Modifications that Enhance Neonatal Fc Receptor (FcRn) Recycling
            [0413] c) Enhancement of or Reduction/Elimination of Fc Immune Effector Functions
         [0414] ii. Other Modifications of Fc portions
         [0415] iii. Human Serum Albumin
      [0416] e. Multi-specific TNFR1 antagonist/TNFR2 agonist Constructs PEGylation for Linking Components of the Multi-Specific Constructs, PEG-centered Multi-Specific Construct, such as Bi-Specific, TNFR1 Antagonist/TNFR2 Agonist Constructs
      [0417] f. Additional Activity modifiers—Fusion proteins that include portions or entire polypeptides that increase serum half-life
   [0418] 5. Prediction and Removal of Immunogenicity in Protein Therapeutics
      [0419] a. B-cell and T-Cell Epitopes
      [0420] b. In Silico Epitope Prediction Methods
         [0421] i. In Silico Prediction of B-Cell Epitopes
         [0422] ii. In Silico Prediction of T-Cell Epitopes
         [0423] iii. Peptide-MHC Class II Binding Prediction
      [0424] c. In Vitro Epitope Prediction Methods
         [0425] i. In Vitro B-cell Epitope Prediction Methods
         [0426] ii. In Vitro T-Cell Epitope Prediction Methods MHC/HLA Binding Assays
         [0427] iii. In Vitro T-Cell Assays
      [0428] d. In Vivo Epitope Prediction Methods
      [0429] e. Removal of Predicted B-cell and T-cell Epitopes (De-immunization)
[0430] G. PAN-GROWTH FACTOR TRAP POLYPEPTIDES
   [0431] 1. Receptor Tyrosine Kinases (RTKs)
      [0432] a. Human Epidermal Growth Factor Receptor (HER) Family
      [0433] b. Diseases Associated with the Human Epidermal Growth Factor Receptor (HER) Family and their Ligands
   [0434] 2. Pan-Growth Factor Inhibition
      [0435] a. RB242 Ligand Trap
      [0436] b. RB200 and RB242 for the Treatment of Autoimmune Disease
      [0437] c. RB242 Ligand Trap
   [0438] 3. Optimized Multi-Specific, such as Bi-Specific, Growth Factor Trap Constructs
      [0439] a. The Extracellular Domain (ECD) Polypeptides
      [0440] b. Modifications to the Extracellular Domains
      [0441] c. The Multimerization Domain
      [0442] d. Modifications to the Fc Domains
         [0443] i. Introduction of Knobs-in-Holes
         [0444] ii. Modifications that Enhance Neonatal Fc Receptor (FcRn) Recycling
         [0445] iii. Effector Functions
   [0446] 4. Compositions, Therapeutic Uses and Methods of Treatment
      [0447] a. Pharmaceutical Compositions
      [0448] b. Therapeutic Uses and Methods of Treatment
   [0449] 5. Combination Therapies
[0450] H. ASSESSING TNFR1 ANTAGONIST AND TNFR1 ANTAGONIST/TNFR2 AGONIST CONSTRUCT ACTIVITY AND EFFICACY
   [0451] 1. Disease Activity Score (DAS28)
   [0452] 2. SOMAscan® Proteomic Analysis and other proteomic tools for quantifying analytes
   [0453] 3. Transcriptome Analysis to Predict Responsiveness to Therapy and to select subjects likely to benefit from treatment
   [0454] 4. L929 Cytotoxicity Assay
   [0455] 5. HeLa IL-8 Assay
   [0456] 6. HUVEC Assay
   [0457] 7. Quantification and Evaluation of Treg Cell Activity
   [0458] 8. Evaluation of Binding Properties of the TNFR1 antagonist/TNFR2 Agonist Constructs
   [0459] 9. Antibody-Dependent Cellular Cytotoxicity (ADCC) and Complement-Dependent Cytotoxicity (CDC) Assays
   [0460] 10. Disease Models
      [0461] a. Collagen-Induced Arthritis (CIA)
      [0462] b. Rheumatoid Arthritis Synovial Membrane Mononuclear Cell Cultures
      [0463] c. Tg197 Mouse Model of Arthritis
      [0464] d. ΔARE Mouse Model of Arthritis/IBD
      [0465] e. Humanized TNF/TNFR2 Mice
[0466] I. METHODS OF PRODUCING NUCLEIC ACIDS ENCODING TNFR1 ANTAGONIST CONSTRUCTS AND TNFR1 ANTAGONIST/TNFR2 AGONIST CONSTRUCTS
   [0467] 1. Isolation or Preparation of Nucleic Acids Encoding TNFR1 Antagonist and TNFR2 Agonist Polypeptides
   [0468] 2. Generation of Mutant or Modified Nucleic Acids and Encoding Polypeptides
   [0469] 3. Vectors and Cells
   [0470] 4. Expression
      [0471] a. Prokaryotic Cells
      [0472] b. Yeast Cells
      [0473] c. Insects and Insect Cells
      [0474] d. Mammalian Expression Cells
      [0475] e. Plants
   [0476] 5. Purification
   [0477] 6. Additional Modifications
      [0478] a. PEGylation
      [0479] b. Albumination
      [0480] c. Purification Tags
   [0481] 7. Nucleic Acid Molecules and Gene Therapy
[0482] J. COMPOSITIONS, FORMULATIONS AND DOSAGES
   [0483] 1. Formulations
   [0484] 2. Administration of the TNFR1 Antagonist Constructs, TNFR2 Agonist Constructs, the Multi-specific, such as Bi-Specific, Constructs and Nucleic acids
   [0485] 3. Administration of Nucleic Acids Encoding Polypeptides (Gene Therapy)
[0486] K. THERAPEUTIC USES AND METHODS OF TREATMENT
   [0487] 1. Treatment of Chronic Inflammatory/Autoimmune Diseases and Disorders
   [0488] 2. Treatment of Neurodegenerative and Demyelinating Diseases and Disorders
   [0489] 3. Treatment of Cancer and other Immunosuppressing Diseases, Disorders, and Conditions
   [0490] 4. Combination Therapies
[0491] L. EXAMPLES

### A. DEFINITIONS

[0492] Unless defined otherwise, all technical and scientific terms used herein have the same meaning as is commonly understood by one of skill in the art to which the invention(s) belong. All patents, patent applications, published applications and publications, GenBank sequences, databases, websites and other published materials referred to throughout the entire disclosure herein, unless noted otherwise, are incorporated by reference in their entirety. In the event that there are a plurality of definitions for terms herein, those in this section prevail. Where reference is made to a URL or other such identifier or address, it is understood that such identifiers can change, and particular information on the internet can come and go, but equivalent information can be found by searching the internet. Reference thereto evidences the availability and public dissemination of such information.

[0493] As used herein, a construct is a product that contains one more components, generally at least two. The components can be polypeptides, small molecules, aptamers, nucleic acids, and/or other such components as described herein or known to those of skill in the art. Various constructs are described and exemplified herein; the components and variety thereof is apparent from the description herein. Those of skill in the art in view of the description can envision other constructs that are within the disclosure and claims herein. The term construct is employed because the products can include a variety of different types of components.

[0494] As used herein, a construct that is a TNFR1 construct or a TNFR2 antagonist construct, is a construct that comprises a TNFR1 inhibitor moiety, which is a moiety that inhibits or reduces a TNFR1 activity, such as signaling.

[0495] As used herein, a construct that is a TNFR2 construct or a TNFR2 agonist construct, is a construct that comprises a TNFR2 agonist moiety, which is a moiety that activates or induces an activity of a TNFR2, such as signaling or an activity the results in increased Treg cells.

[0496] As used herein, a construct that is a TNFR2 antagonist construct, is a construct that comprises a TNFR2 antagonist.

[0497] As used herein, a construct that is a multi-specific construct is a construct that comprises more than one antagonist or agonist or both moieties, such as a construct that contains a TNFR1 inhibitor and a TNFR2 agonist, or a construct that contains two TNFR1 antagonists, such as where each interacts with a different epitope on TNFR1 or each has a different TNFR1 antagonist activity, or two TNFR2 agonists, such as where each interacts with a different TNFR2 epitope, or each has a different TNFR2 agonist activity.

[0498] As used herein, “tumor necrosis factor,” “tumor necrosis factor alpha,” “TNF,” “TNF-alpha,” “TNF-α” and “TNFα” are used interchangeably to refer to a pleiotropic proinflammatory cytokine that is a member of the TNF superfamily and is associated with inflammatory and immuno-regulatory activities, including the regulation of tumorigenesis/cancer, host defense against pathogenic infections, apoptosis, autoimmunity, and septic shock. When other members of the TNF superfamily are intended, they will be identified by name. TNF participates in coordination of innate and adaptive immune responses, as well as in organogenesis, particularly of the lymphoid organs. TNF is produced as a homotrimeric membrane-bound protein containing 233 amino acids that can be cleaved by the protease TACE (TNF alpha converting enzyme; also known as ADAM17) to release soluble TNF (solTNF), which contains 157 amino acids; membrane-bound and soluble forms of TNF are biologically active. Homotrimers of TNF bind to and signal through two high-affinity, specific receptors, TNFR1 and TNFR2; membrane-bound TNF primarily activates TNFR2, while soluble TNF primarily activates TNFR1. The uncontrolled or dysregulated production of TNF is associated with several chronic inflammatory and autoimmune diseases and conditions, including, but not limited to, for example, septic shock, rheumatoid arthritis, psoriasis, psoriatic arthritis, ankylosing spondylitis, juvenile idiopathic arthritis, and inflammatory bowel disease (IBD), as well as neurodegenerative and demyelinating diseases and conditions, including, but not limited to, for example, Alzheimer's disease, Parkinson's disease, stroke and multiple sclerosis.

[0499] As used herein, a “TNF mutein” or “TNF-α mutein” or “modified TNF polypeptide” refers to a polypeptide that has an amino acid sequence that, for TNF from a particular species, differs from the amino acid sequence of a corresponding wild-type TNF (TNFα) by one or more amino acids. Generally, such modified TNF polypeptides retain the ability to activate or inhibit TNFR1 and/or TNFR2. Specific mutations in TNF can render the resulting TNF mutein selective for binding to TNFR1 or TNFR2, and can result in TNF muteins with antagonistic or agonistic properties. For example, as described herein, there are TNFR1-selective antagonistic TNF muteins, and TNFR2-selective agonistic TNF muteins.

[0500] As used herein, a “dominant-negative inhibitor of TNF” or “DN-TNF” is a TNF mutein with one or more mutations that abrogate binding to and signaling through TNFR1 and/or TNFR2. DN-TNFs selectively inhibit soluble TNF (sTNF or solTNF) by rapidly exchanging subunits with native TNF homotrimers, forming inactive mixed TNF heterotrimers with disrupted receptor binding surfaces, thus preventing interaction with TNF receptors. DN-TNFs leave transmembrane TNF (tmTNF) unaffected, maintaining the protective roles of TNF signaling through TNFR2. Examples of DN-TNFs are TNF mutants containing one or more of the replacements L133Y, S162Q, Y163H, I173T, Y191Q and A221R, with reference to the sequence of amino acids set forth in SEQ ID NO:1 (corresponding to residues L57Y, S86Q, Y87H, I97T, Y115Q, and A145R, with reference to the sequence of solTNF, as set forth in SEQ ID NO:2), which impair binding to TNFRs.

[0501] As used herein, a “modification” is in reference to the modification of a sequence of amino acids in a polypeptide, or a sequence of nucleotides in a nucleic acid molecule, and includes deletions, insertions, transpositions, replacements and combinations thereof of amino acids or nucleotides, respectively. Methods of modifying a polypeptide or nucleic acid are routine to those of skill in the art, such as by using recombinant DNA methodologies.

[0502] As used herein, “deletion,” when referring to a nucleic acid or polypeptide sequence, refers to the deletion of one or more nucleotides or amino acids compared to a sequence, such as a target polynucleotide or polypeptide, or a native or wild-type sequence.

[0503] As used herein, “insertion,” when referring to a nucleic acid or amino acid sequence, describes the inclusion of one or more additional nucleotides or amino acids, within a target, native, wild-type or other related sequence. Thus, a nucleic acid molecule that contains one or more insertions compared to a wild-type sequence, contains one or more additional nucleotides within the linear length of the sequence.

[0504] As used herein, “addition,” when referring to a nucleic acid or amino acid sequence, describes the addition of one or more nucleotides or amino acids onto either termini, compared to another sequence.

[0505] As used herein, a “substitution” or “replacement” refers to the replacing of one or more nucleotides or amino acids in a native, target, wild-type or other nucleic acid or polypeptide sequence, with an alternative nucleotide or amino acid, without changing the length (as described in numbers of residues) of the molecule. Thus, one or more substitutions in a molecule does not change the number of amino acid residues or nucleotides of the molecule. Amino acid replacements compared to a particular polypeptide can be expressed in terms of the number of the amino acid residue along the length of the polypeptide sequence. For example, a modified polypeptide having a modification in the amino acid at the 100^{th} position of the amino acid sequence that is a substitution/replacement of tyrosine (Tyr; Y) with glutamic acid (Glu; E), can be expressed as Y100E, Tyr100Glu, or 100E. Y100 can be used to indicate that the amino acid at the modified 100^{th} position is a tyrosine. For purposes herein, since modifications are in a heavy chain (HC) or light chain (LC) of an antibody, modifications also can be denoted by reference to HC- or LC- to indicate the chain of the polypeptide.

[0506] As used herein, “at a position corresponding to,” or recitation that nucleotides or amino acid positions “correspond to” nucleotides or amino acid positions in a disclosed sequence, such as set forth in the Sequence Listing, refers to nucleotides or amino acid positions identified upon alignment with a referenced sequence to maximize identity using a standard alignment algorithm, such as the GAP algorithm. By aligning the sequences, one skilled in the art can identify corresponding residues, for example, using conserved and identical amino acid residues as guides. In general, to identify corresponding positions, the sequences of amino acids are aligned so that the highest order match is obtained (see, e.g., Computational Molecular Biology, Lesk, A. M., ed., Oxford University Press, New York, 1988; Biocomputing: Informatics and Genome Projects, Smith, D. W., ed., Academic Press, New York, 1993; Computer Analysis of Sequence Data, Part I, Griffin, A. M., and Griffin, H. G., eds., Humana Press, New Jersey, 1994; Sequence Analysis in Molecular Biology, von Heinje, G., Academic Press, 1987; Sequence Analysis Primer, Gribskov, M. and Devereux, J., eds., M Stockton Press, New York, 1991; and Carrillo et al. (1988) SIAM J. Applied Math 48:1073).

[0507] As used herein, alignment of a sequence refers to the use of homology to align two or more sequences of nucleotides or amino acids. Typically, two or more sequences that are related by 50% or more identity are aligned. An aligned set of sequences refers to 2 or more sequences that are aligned at corresponding positions and can include aligning sequences derived from RNAs, such as ESTs and other cDNAs, aligned with a genomic DNA sequence. Related or variant polypeptides or nucleic acid molecules can be aligned by any method known to those of skill in the art. Such methods typically maximize matches, and include methods, such as using manual alignments and by using the numerous alignment programs available (e.g., BLASTP) and others known to those of skill in the art. By aligning the sequences of polypeptides or nucleic acids, one skilled in the art can identify analogous portions or positions, using conserved and identical amino acid residues as guides. Further, one skilled in the art also can employ conserved amino acid or nucleotide residues as guides to find corresponding amino acid or nucleotide residues between and among human and non-human sequences. Corresponding positions also can be based on structural alignments, for example, by using computer simulated alignments of protein structure. In other instances, corresponding regions can be identified. One skilled in the art also can employ conserved amino acid residues as guides to find corresponding amino acid residues between and among human and non-human sequences.

[0508] As used herein, recitation that proteins are “compared under the same conditions” means that different proteins are treated identically or substantially identically such that any one or more conditions that can influence the activity or properties of a protein or agent are not varied or not substantially varied between the test agents. For example, when the activity of an antibody is compared to another antibody, any one or more conditions, such as the amount or concentration of the polypeptide; the presence, including amount, of excipients, carriers or other components in a formulation other than the active agent (e.g., antibody); temperature; pH; time of storage; storage vessel; properties of storage (e.g., agitation); and/or other conditions associated with exposure or use, are identical or substantially identical between and among the compared polypeptides/antibodies.

[0509] As used herein, an “adverse effect,” or “side effect,” or “adverse event,” or “adverse side effect,” refers to a harmful, deleterious and/or undesired effect associated with administering a therapeutic agent. For example, side effects associated with the administration of an anti-TNF antibody, such as adalimumab (sold, for example, under the trademark Humira®), are known to one of skill in the art, and some are described herein. Such adverse side effects include, for example, serious infections, such as tuberculosis, and other infections caused by viruses, fungi and bacteria, including upper respiratory infections, as well as dermatological and dermal toxicity, such as rash, headaches and nausea. Thus, “adverse effect” or “side effect” refers to a harmful, deleterious and/or undesired effect of administering a therapeutic agent. Side effects or adverse effects are graded on toxicity, and various toxicity scales exist, providing definitions for each grade. Examples of such scales are toxicity scales of the National Cancer Institute Common Toxicity Criteria version 2.0, and the World Health Organization or Common Terminology Criteria for Adverse Events (CTCAE) scale. Assigning grades of severity is within the skill of an experienced physician or other health care professional. The severity of symptoms can be quantified using the NCI Common Terminology Criteria for Adverse Events (CTCAE) grading system. The CTCAE is a descriptive terminology used for Adverse Event (AE) reporting. The grading (severity) scale is provided for each AE term. The CTCAE displays Grades 1 through 5, with clinical descriptions for severity for each adverse event based on the following general guideline: Grade 1 (Mild AE); Grade 2 (Moderate AE); Grade 3 (Severe AE); Grade 4 (Life-threatening or disabling AE); and Grade 5 (Death related to AE/fatal).

[0510] As used herein, a “property” of a polypeptide, such as an antibody, refers to any property exhibited by a polypeptide, including, but not limited to, binding specificity, structural configuration or conformation, protein stability, resistance to proteolysis, conformational stability, thermal tolerance, and tolerance to pH conditions. Changes in properties can alter an “activity” of the polypeptide. For example, a change in the binding specificity of the antibody polypeptide can alter the ability to bind an antigen, and/or various binding activities, such as affinity or avidity, or in vivo activities of the polypeptide.

[0511] As used herein, an “activity” or a “functional activity” of a polypeptide, such as an antibody, refers to any activity exhibited by the polypeptide. Such activities can be empirically determined. Exemplary activities include, but are not limited to, the ability to interact with a biomolecule, for example, through antigen-binding, DNA binding, ligand binding, or dimerization; and enzymatic activity, for example, kinase activity or proteolytic activity. For an antibody (including antibody fragments), activities include, but are not limited to, the ability to specifically bind a particular antigen, affinity of antigen-binding (e.g., high or low affinity), avidity of antigen-binding (e.g., high or low avidity), on-rate, off-rate, effector functions, such as the ability to promote antigen neutralization or clearance, virus neutralization, and in vivo activities, such as the ability to prevent infection or invasion of a pathogen, or to promote clearance, or to penetrate a particular tissue or fluid or cell in the body. Activity can be assessed in vitro or in vivo using recognized assays, such as ELISA, flow cytometry, surface plasmon resonance or equivalent assays to measure on- or off-rate, immunohistochemistry and immunofluorescence histology and microscopy, cell-based assays, flow cytometry, and binding assays (e.g., panning assays). For example, for an antibody polypeptide, activities can be assessed by measuring binding affinities, avidities, and/or binding coefficients (e.g., for on-/off-rates), and other activities in vitro, or by measuring various effects in vivo, such as immune effects, e.g., antigen clearance; penetration or localization of the antibody into tissues; protection from disease, e.g., infection; serum or other fluid antibody titers; or other assays that are well-known in the art. The results of such assays that indicate that a polypeptide exhibits an activity can be correlated to activity of the polypeptide in vivo, in which in vivo activity can be referred to as therapeutic activity, or biological activity. Activity of a modified polypeptide can be any level of percentage of activity of the unmodified polypeptide, including but not limited to, 1% of the activity, 2%, 3%, 4%, 5%, 10%, 20%, 30%, 40%, 50%, 60%, 70%, 80%, 90%, 91%, 92%, 93%, 94%, 95%, 96%, 97%, 98%, 99%, 100%, 200%, 300%, 400%, 500%, or more, of activity compared to the unmodified polypeptide. Assays to determine functionality or activity of modified (or variant) antibodies are well-known in the art.

[0512] As used herein, “bind,” “bound,” and grammatical variations thereof, refers to the participation of a molecule in any attractive interaction with another molecule, resulting in a stable association in which the two molecules are in close proximity to one another. Binding interactions include, but are not limited to, non-covalent bonds, covalent bonds (such as reversible and irreversible covalent bonds), and includes interactions between molecules, such as, but not limited to, proteins, nucleic acids, carbohydrates, lipids, and small molecules, such as chemical compounds, including drugs. Exemplary bonds are antibody-antigen interactions and receptor-ligand interactions. When an antibody “binds” a particular antigen, “bind” refers to the specific recognition of the antigen by the antibody, through cognate antibody-antigen interaction, at antibody combining sites. Binding also can include the association of multiple chains of a polypeptide, such as antibody chains, which interact through disulfide bonds.

[0513] As used herein, “binding activity” refers to characteristics of a molecule, e.g., a polypeptide, relating to whether or not, and how, it binds one or more binding partners. Binding activities include the ability to bind the binding partner(s), the affinity with which it binds to the binding partner (e.g., high affinity), the avidity with which it binds to the binding partner, the strength of the bond with the binding partner, and/or the specificity for binding with the binding partner.

[0514] As used herein, “affinity” or “binding affinity” describes the strength of the interaction between two or more molecules, such as binding partners, and typically, the strength of the noncovalent interactions between two binding partners. The affinity of an antibody or antigen-binding fragment thereof for an antigen epitope is the measure of the strength of the total noncovalent interactions between a single antibody combining site and the epitope. Low-affinity antibody-antigen interaction is weak, and the molecules tend to dissociate rapidly, while high affinity antibody-antigen binding is strong and the molecules remain bound for a longer amount of time. Binding affinity can be determined in terms of binding kinetics, such as by measuring rates of association (kₐ or kₒₙ) and/or dissociation (k_{d} or k_{off}), half maximal effective concentration (EC₅₀) values, and/or thermodynamic data (e.g., Gibbs free energy (ΔG), enthalpy (ΔH), entropy (-TΔS), and/or calculating association (Kₐ) or dissociation (K_{d}) constants. EC₅₀, also called the apparent K_{d}, is the concentration (e.g., ng/mL) of antibody, where 50% of the maximal binding is observed to a fixed amount of antigen. Typically, EC₅₀ values are determined from sigmoidal dose-response curves, where the EC₅₀ is the concentration at the inflection point. A high antibody affinity for its substrate correlates with a low EC₅₀ value, and a low affinity corresponds to a high EC₅₀ value. Affinity constants can be determined by standard kinetic methodology for antibody reactions, for example, immunoassays, such as ELISA, followed by curve-fitting analysis.

[0515] As used herein, “affinity constant” refers to an association constant (Kₐ) used to measure the affinity of an antibody for an antigen. The higher the affinity constant, the greater the affinity of the antibody for the antigen. Affinity constants are expressed in units of reciprocal molarity (i.e., M⁻¹), and can be calculated from the rate constant for the association-dissociation reaction, as measured by standard kinetic methodology for antibody reactions (e.g., immunoassays, surface plasmon resonance, or other kinetic interaction assays known in the art). The binding affinity of an antibody also can be expressed as a dissociation constant, or K_{d}. The dissociation constant is the reciprocal of the association constant, i.e., K_{d}=1/Kₐ. Hence, an affinity constant also can be represented by the K_{d}. Affinity constants can be determined by standard kinetic methodology for antibody reactions, for example, immunoassays, surface plasmon resonance (SPR) (see, e.g., Rich and Myszka (2000) Curr. Opin. Biotechnol 11:54; Englebienne (1998) Analyst. 123:1599), isothermal titration calorimetry (ITC) or other kinetic interaction assays known in the art (see, e.g., Paul, ed., Fundamental Immunology, 2nd ed., Raven Press, New York, pages 332-336 (1989); see also, U.S. Pat. No. 7,229,619, for a description of exemplary SPR and ITC methods for calculating the binding affinity of antibodies). Instrumentation and methods for real time detection and monitoring of binding rates are known and are commercially available (e.g., BIAcore 2000, BIAcore AB, Upsala, Sweden and GE Healthcare Life Sciences; Malmqvist (2000) Biochem. Soc. Trans. 27:335).

[0516] Methods for calculating affinity are well-known, such as methods for determining EC₅₀ values, or methods for determining association/dissociation constants. For example, in terms of EC₅₀, high binding affinity means that the antibody specifically binds to a target protein with an EC₅₀ that is less than about 10 ng/mL, 9 ng/mL, 8 ng/mL, 7 ng/mL, 6 ng/mL, 5 ng/mL, 3 ng/mL, 2 ng/mL, 1 ng/mL or less. High binding affinity also can be characterized by an equilibrium dissociation constant (K_{d}) of 10⁻⁶ M or lower, such as 10⁻⁷ M, 10⁻⁸ M, 10⁻⁹ M, 10⁻¹⁰ M, 10⁻¹¹ M, or 10⁻¹² M, or lower. In terms of equilibrium association constant (Kₐ), high binding affinity is generally associated with Kₐ values of greater than or equal to about 10⁶ M⁻¹, greater than or equal to about 10⁷ M⁻¹, greater than or equal to about 10⁸ M⁻¹, or greater than or equal to about 10⁹ M⁻¹, 10¹⁰ M⁻¹, 10¹¹ M⁻¹, or 10¹² M⁻¹. Affinity can be estimated empirically, or affinities can be determined comparatively, e.g., by comparing the affinity of two or more antibodies for a particular antigen, for example, by calculating pairwise ratios of the affinities of the antibodies tested. For example, such affinities can be readily determined using conventional techniques, such as by ELISA; equilibrium dialysis; surface plasmon resonance; by radioimmunoassay using a radiolabeled target antigen; or by another method known to the skilled artisan. The affinity data can be analyzed, for example, by the method of Scatchard et al., (1949) Ann N.Y. Acad. Sci., 51:660, or by curve fitting analysis, for example, using a 4 Parameter Logistic nonlinear regression model using the equation: y=((A−D)/(1+((x/C)\hat{ }B)))+D, where A is the minimum asymptote, B is the slope factor, C is the inflection point (EC₅₀), and D is the maximum asymptote.

[0517] As used herein, “antibody avidity” refers to the strength of multiple interactions between a multivalent antibody and its cognate antigen, such as with antibodies containing multiple binding sites associated with an antigen with repeating epitopes or an epitope array. A high avidity antibody has a higher strength of such interactions compared to a low avidity antibody.

[0518] As used herein, “specificity for a target,” such as TNFR1, refers to a preference, higher binding affinity, for binding to the target compared to a non-target. Selective binding refers to binding to a target with an affinity, generally, of at least about 10⁷-10⁸ M⁻¹. It also can refer to relative activity in which the affinity of a moiety or molecule for one target molecule is compared to the affinity for another molecule, and if the difference is of a certain magnitude, such as about 10-fold, the moiety or molecule is said to have greater specificity for the first target relative to the second.

[0519] As used herein, “specifically binds” or “immunospecifically binds,” with respect to an antibody or antigen-binding fragment thereof, are used interchangeably herein and refer to the ability of the antibody or antigen-binding fragment to form one or more noncovalent bonds with a cognate antigen, by noncovalent interactions between the antibody combining site(s) of the antibody and the antigen. Typically, an antibody that immunospecifically binds (or that specifically binds), for example, to TNFR1, is one that binds to TNFR1 with an affinity constant (Kₐ) of about or 1×10⁷ M⁻¹ or 1×10⁸ M⁻¹ or greater (or a dissociation constant (K_{d}) of 1×10⁻⁷ M or 1×10⁻⁸ M or less). Antibodies or antigen-binding fragments that immunospecifically bind to a particular antigen can be identified, for example, by immunoassays, such as radioimmunoassays (RIA), enzyme-linked immunosorbent assays (ELISAs), surface plasmon resonance (SPR), or other techniques known to those of skill in the art.

[0520] As used herein, “steric effects” refer to the effects of the size of atoms or groups on the molecule. Steric effects include, but are not limited to, steric hindrance and van der Waals repulsion. Steric effects are the effects resulting from the fact that atoms occupy space; when atoms are put close to each other, this costs energy, as the electrons near the atoms repel each other.

[0521] As used herein, “exhibits at least one activity” or “retains at least one activity” refers to the activity exhibited by an antibody polypeptide, such as a variant antibody or other therapeutic polypeptide, compared to the target or unmodified polypeptide, that does not contain the modification. A modified, or variant, polypeptide that retains an activity of a target polypeptide can exhibit improved activity, decreased activity, or maintain the activity of the unmodified polypeptide. In some instances, a modified, or variant, polypeptide can retain an activity that is increased compared to a target or unmodified polypeptide. In some cases, a modified, or variant, polypeptide can retain an activity that is decreased compared to an unmodified or target polypeptide. Activity of a modified, or variant, polypeptide can be any level of percentage of activity of the unmodified or target polypeptide, including but not limited to, 1% of the activity, 2%, 3%, 4%, 5%, 10%, 20%, 30%, 40%, 50%, 60%, 70%, 80%, 90%, 91%, 92%, 93%, 94%, 95%, 96%, 97%, 98%, 99%, 100%, 200%, 300%, 400%, 500%, or more activity, compared to the unmodified or target polypeptide. In other embodiments, the change in activity is at least about 2 times, 3 times, 4 times, 5 times, 6 times, 7 times, 8 times, 9 times, 10 times, 20 times, 30 times, 40 times, 50 times, 60 times, 70 times, 80 times, 90 times, 100 times, 200 times, 300 times, 400 times, 500 times, 600 times, 700 times, 800 times, 900 times, 1000 times, or more times, greater than the unmodified or target polypeptide. Assays for retention of an activity depend on the activity to be retained. Such assays can be performed in vitro or in vivo. Activity can be measured, for example, using assays known in the art and described below for activities, such as, but not limited to, ELISA and panning assays. Activities of a modified, or variant, polypeptide compared to an unmodified or target polypeptide also can be assessed in terms of an in vivo therapeutic or biological activity or result following administration of the polypeptide.

[0522] As used herein, the “surface plasmon resonance” refers to an optical phenomenon that allows for the analysis of real-time interactions by detection of alterations in protein concentrations within a biosensor matrix. Commercial systems are available. For example the BIAcore system (GE Healthcare Life Sciences) is an exemplary commercial system.

[0523] As used herein, “antibody” refers to immunoglobulins and immunoglobulin fragments, whether natural, or partially or wholly synthetically, such as recombinantly, produced, including any fragment thereof containing at least a portion of the variable heavy chain and/or variable light chain regions of the immunoglobulin molecule that is sufficient to form an antigen-binding site and, when assembled, to specifically bind an antigen. Hence, an antibody includes any protein having a binding domain that is homologous or substantially homologous to an immunoglobulin antigen-binding domain (antibody combining site). For example, an antibody refers to an antibody that contains two heavy chains (which can be denoted H and H′) and two light chains (which can be denoted L and L′), where each heavy chain can be a full-length immunoglobulin heavy chain or a portion thereof sufficient to form an antigen-binding site (e.g., heavy chains include, but are not limited to, V_{H} chains, V_{H}-C_{H}1 chains, and V_{H}-C_{H}1-C_{H}2-C_{H}3 chains), and each light chain can be a full-length light chain or a portion thereof sufficient to form an antigen-binding site (e.g., light chains include, but are not limited to, V_{L} chains and V_{L}-C_{L} chains). Each heavy chain (H and H′) pairs with one light chain (L and L′, respectively). Typically, antibodies minimally include all or at least a portion of the variable heavy (V_{H}) chain and/or the variable light (V_{L}) chain. An antibody also can include other regions, such as, for example, all or a portion of the constant region, and/or all or a portion (sufficient to provide flexibility) of the hinge region.

[0524] For purposes herein, the term “antibody,” unless otherwise specified, includes full-length antibodies and portions thereof, including antibody fragments, such as, for example, anti-TNFR1, antibody fragments. Antibody fragments, include, but are not limited to, for example, Fab fragments, Fab′ fragments, F(ab′)₂ fragments, Fv fragments, disulfide-linked Fvs (dsFv), Fd fragments, Fd′ fragments, single-chain Fvs (scFvs), single-chain Fabs (scFab), hsFv (helix-stabilized Fv), single domain antibodies (dAbs, or sdAbs), minibodies, diabodies, anti-idiotypic (anti-Id) antibodies, nanobodies and camelid antibodies, free light chains, V_{HH} antibodies (or nanobodies), or antigen-binding fragments of any of the above. Antibody fragments also can include combinations of any of the above fragments, such as, for example, tandem scFv, Fab-scFv (HC C-term, or LC C-term), Fab-(scFv)₂ (C-term), scFv-Fab-scFv, Fab-C_{H}2-scFv, scFv fusions (C term, or N term), Fab-fusions (HC C-term, or LC C-term), scFv-scFv-dAb, scFv-dAb-scFv, dAb-scFv-scFv, and tribodies. The term “antibody” includes synthetic antibodies, recombinantly produced antibodies, multi-specific and heteroconjugate antibodies (e.g., bi-, tri- and quad-specific antibodies, diabodies, triabodies and tetrabodies), human antibodies, non-human antibodies, humanized antibodies, chimeric antibodies, and intrabodies. Antibodies provided herein include members of any immunoglobulin class (e.g., IgG, IgM, IgD, IgE, IgA and IgY), any subclass (e.g., IgG1, IgG2, IgG3, IgG4, IgA1 and IgA2) or sub-subclass (e.g., IgG2a and IgG2b).

[0525] As used herein, a “form of an antibody” refers to a particular structure of an antibody. Antibodies herein include full-length antibodies and portions thereof, such as, for example, a Fab fragment or other antibody fragment. Thus, a Fab is a particular form of an antibody.

[0526] As used herein, reference to a “corresponding form” of an antibody means that, when comparing a property or activity of two antibodies, the property is compared using the same form of the antibody. For example, if it is stated that an antibody has less activity compared to the activity of the corresponding form of a first antibody, that means that a particular form, such as a Fab of that antibody, has less activity compared to the Fab form of the first antibody.

[0527] As used herein, a full-length antibody is an antibody having two full-length heavy chains (e.g., V_{H}-C_{H}1-C_{H}2-C_{H}3, or V_{H}-C_{H}1-C_{H}2-C_{H}3-C_{H}4), two full-length light chains (V_{L}-C_{L}), and hinge regions, such as human antibodies produced by antibody secreting B cells, and antibodies with the same domains that are produced synthetically.

[0528] As used herein, a “multi-specific construct” refers to a construct, such as an antibody or construct comprising portions of an antibody, that exhibits affinity for more than one target antigen so that it can specifically interact with the targets. Multi-specific constructs herein can have structures similar to full immunoglobulin molecules and include Fc regions, for example IgG Fc regions, and antigen-binding regions, such as portions that specifically bind to TNFR1 or TNFR2.

[0529] As used herein, a “bispecific construct” refers to a multi-specific construct that has binding specificity for two different antigens. Bispecific constructs include, for example, monoclonal antibodies or antigen-binding fragments thereof linked to a polypeptide region, such as Fc or modified Fc, that modifies the activity of the construct. For human therapeutics, the constructs are derived from human sources or are derived from a human source or are humanized, and the constructs have binding specificities for at least two different antigens. Bi-specific constructs/molecules provided herein can have binding specificities that are directed to TNFR1, and TNFR2. For example, the bi-specific constructs include a TNFR1 antagonist and a TNFR2 agonist. A bispecific antibody or construct includes antibodies and antigen-binding fragment thereof that includes two separate antigen-binding domains (e.g., two scFvs, or two dAbs, or two Fabs, joined by a linker). The antigen-binding domains can bind to the same antigen or different antigens.

[0530] As used herein, “antibody fragment” or “antibody portion” refers to any portion of a full-length antibody that is less than full-length, but contains at least a portion of the variable region(s) of the antibody sufficient to form an antigen-binding site (e.g., one or more complementarity-determining region (CDRs)), and thus, retains the binding specificity and/or an activity of the full-length antibody; antibody fragments include antibody derivatives produced by enzymatic treatment of full-length antibodies, as well as synthetically, e.g., recombinantly, produced derivatives. Examples of antibody fragments include, but are not limited to, Fab, Fab′, F(ab)₂, single-chain Fvs (scFvs), Fv, dsFv, diabody, triabody, affibody, nanobody, aptamer, dAb, Fd and Fd fragments (see, for example, Methods in Molecular Biology, Vol 207: Recombinant Antibodies for Cancer Therapy Methods and Protocols (2003); Chapter 1; pp. 3-25, Kipriyanov). The fragment can include multiple chains linked together, such as by disulfide bridges, and/or by peptide linkers. An antibody fragment generally contains at least about 50 amino acids, such as at about or at least 100 amino acids, and typically, at least about or at least 110, 120, 150, 170, 180, or 200 amino acids.

[0531] As used herein, an “Fv antibody fragment” is composed of one variable heavy domain (V_{H}) and one variable light (V_{L}) domain, linked by noncovalent interactions.

[0532] As used herein, a dsFv (disulfide-linked Fv) refers to an Fv with an engineered intermolecular disulfide bond, which stabilizes the V_{H}-V_{L} pair.

[0533] As used herein, an “scFv fragment” refers to an antibody fragment that contains a variable light chain (V_{L}) and variable heavy chain (V_{H}), covalently connected by a polypeptide linker in any order. The linker is of a length, such that the two variable domains are bridged without substantial interference. Exemplary linkers are (Gly-Ser)ₙ residues with some Glu or Lys residues dispersed throughout to increase solubility.

[0534] As used herein, “diabodies” are dimeric scFv; diabodies typically have shorter peptide linkers than scFvs, and preferentially dimerize.

[0535] As used herein, “triabodies” are trimeric scFv; they contain three peptide chains, each of which contains one V_{H} domain and one V_{L} domain joined by a short linker (e.g., a linker composed of 1-2 amino acids) to permit intramolecular association of V_{H} and V_{L} domains within the same peptide chain; triabodies typically trimerize.

[0536] As used herein, a “Fab fragment” is an antibody fragment that results from digestion of a full-length immunoglobulin with papain, or a fragment having the same structure that is produced synthetically, e.g., by recombinant methods. A Fab fragment contains a light chain (containing a V_{L} and C_{L}), and another chain containing a variable domain of a heavy chain (V_{H}) and one constant region domain of the heavy chain (C_{H}1).

[0537] As used herein, a “F(ab′)₂ fragment” is an antibody fragment that results from digestion of an immunoglobulin with pepsin at pH 4.0-4.5, or a fragment having the same structure that is produced synthetically, e.g., by recombinant methods. The F(ab′)₂ fragment essentially contains two Fab fragments, where each heavy chain portion contains an additional few amino acids, such as, for example, all or a portion, sufficient to provide flexibility, of the hinge region, including cysteine residues that form disulfide linkages joining the two fragments.

[0538] As used herein, a Fab′ fragment is a fragment containing one half (i.e., one heavy chain and one light chain) of the F(ab′)₂ fragment.

[0539] As used herein, an Fd fragment is a fragment of an antibody containing a variable domain (V_{H}) and one constant region domain (C_{H}1) of an antibody heavy chain.

[0540] As used herein, an Fd′ fragment is a fragment of an antibody containing one heavy chain portion of a F(ab′)₂ fragment.

[0541] As used herein, an Fv′ fragment is a fragment containing only the V_{H} and V_{L} domains of an antibody molecule.

[0542] As used herein, hsFv (helix-stabilized Fv) refers to an antibody fragment in which the constant domains normally present in a Fab fragment have been substituted with a heterodimeric coiled-coil domain (see, e.g., Arndt et al. (2001) J. Mol. Biol. 7:312:221-228).

[0543] As used herein, a “domain antibody,” “single domain antibody,” “sdAb,” or “dAb,” used interchangeably, refers to a monomeric small antibody fragment that contains a variable domain of the heavy chain (V_{H}) or of the light chain (V_{L}) of an antibody. dAbs are the smallest antigen-binding fragments of antibodies; they are about approximately 11-15 kDa in size (about 100-150 amino acids), which is approximately one-tenth the size of a full monoclonal antibody (mAb). There are three complementarity determining regions (CDRs) on each V_{H} and each V_{L}. Each dAb contains three out of the six CDRs, which are the highly diversified loop regions that bind to the target antigen, from a V_{H}-V_{L} pair in an antibody.

[0544] As used herein, a camelid antibody, also referred to as a nanobody or VHHs, lacks a light chain and is composed of two identical heavy chains. They occur naturally in camelids, such as camels and alpacas.

[0545] As used herein, a polypeptide “domain” is a part of a polypeptide (a sequence of 3 or more, generally 5, 10, or more, amino acids) that is structurally and/or functionally distinguishable or definable. An exemplary polypeptide domain is a part of the polypeptide that can form an independently folded structure within a polypeptide made up of one or more structural motifs (e.g., combinations of alpha helices and/or beta strands connected by loop regions), and/or that is recognized by a particular functional activity, such as enzymatic activity, dimerization or antigen-binding. A polypeptide can have one or more, typically more than one, distinct domains. For example, the polypeptide can have one or more structural domains and one or more functional domains. A single polypeptide domain can be distinguished based on structure and function. A domain can encompass a contiguous linear sequence of amino acids. Alternatively, a domain can encompass a plurality of non-contiguous amino acid portions, which are non-contiguous along the linear sequence of amino acids of the polypeptide. Typically, a polypeptide contains a plurality of domains. For example, each heavy chain and each light chain of an antibody molecule contains a plurality of immunoglobulin (Ig) domains, each about 110 amino acids in length. Those of skill in the art are familiar with polypeptide domains and can identify them by virtue of structural and/or functional homology with other such domains. For exemplification herein, definitions are provided, but it is understood that it is well within the skill in the art to recognize particular domains by name. If needed, appropriate software can be employed to identify domains.

[0546] As used herein, a “functional region” of a polypeptide is a region of the polypeptide that contains at least one functional domain (which imparts a particular function, such as an ability to interact with a biomolecule, for example, through antigen-binding, DNA binding, ligand binding, or dimerization, or by enzymatic activity, for example, kinase activity or proteolytic activity); exemplary functional regions of polypeptides are antibody domains, such as V_{H}, V_{L}, C_{H}, C_{L}, and portions thereof, such as CDRs, including CDR1, CDR2 and CDR3, or antigen-binding portions, such as antibody combining sites.

[0547] As used herein, a “structural region” of a polypeptide is a region of the polypeptide that contains at least one structural domain.

[0548] As used herein, an “Ig domain” is a domain, recognized as such by those in the art, that is distinguished by a structure, called the Immunoglobulin (Ig) fold, which contains two beta-pleated sheets, each containing anti-parallel beta strands of amino acids connected by loops. The two beta sheets in the Ig fold are sandwiched together by hydrophobic interactions and a conserved intra-chain disulfide bond. Individual immunoglobulin domains within an antibody chain further can be distinguished based on function. For example, a light chain contains one variable region domain (V_{L}) and one constant region domain (C_{L}), while a heavy chain contains one variable region domain (V_{H}) and three or four constant region domains (C_{H}). Each V_{L}, C_{L}, V_{H}, and C_{H} domain is an example of an immunoglobulin domain.

[0549] As used herein, a “variable domain,” with reference to an antibody, is a specific immunoglobulin (Ig) domain of an antibody heavy or light chain that contains a sequence of amino acids that varies among different antibodies. Each light chain and each heavy chain has one variable region domain (V_{L} and V_{H}, respectively). The variable domains provide antigen specificity, and thus, are responsible for antigen recognition. Each variable region contains complementarity-determining regions (CDRs) that are part of the antigen-binding site domain and framework regions (FRs).

[0550] As used herein, “hypervariable region,” “HV,” “complementarity-determining region,” “CDR” and “antibody CDR” are used interchangeably to refer to one of a plurality of portions within each variable region that together form an antigen-binding site of an antibody. Each variable region domain contains three CDRs, named CDR1, CDR2, and CDR3. The three CDRs are non-contiguous along the linear amino acid sequence, but are proximate in the folded polypeptide. The CDRs are located within the loops that join the parallel strands of the beta sheets of the variable domain.

[0551] As used herein, “antigen-binding domain,” “antigen-binding site,” “antigen-binding fragment,” “antigen combining site” and “antibody combining site” are used synonymously to refer to a domain within an antibody that recognizes and physically interacts with the cognate antigen. A native conventional full-length antibody molecule has two conventional antigen-binding sites, each containing portions of a heavy chain variable region and portions of a light chain variable region. A conventional antigen-binding site contains the loops that connect the anti-parallel beta strands within the variable region domains. The antigen combining sites can contain other portions of the variable region domains. Each conventional antigen-binding site contains three hypervariable regions from the heavy chain and three hypervariable regions from the light chain. The hypervariable regions also are called complementarity-determining regions (CDRs).

[0552] As used herein, “portion thereof,” with reference to an antibody heavy or light chain, or variable heavy or light chain, refers to a contiguous portion thereof that is sufficient to form an antigen-binding site such that, when assembled into an antibody containing a heavy and light chain, it contains at least 1 or 2, typically 3, 4, 5 or all 6 CDRs of the variable heavy (V_{H}) and variable light (V_{L}) chains sufficient to retain at least a portion of the binding specificity of the corresponding full-length antibody containing all 6 CDRs. Generally, a sufficient antigen-binding site requires the CDR3 of the heavy chain (CDRH3). It typically further requires the CDR3 of the light chain (CDRL3). As described herein, one of skill in the art knows and can identify the CDRs based on Kabat or Chothia numbering (see e.g., Kabat, E. A. et al. (1991) Sequences of Proteins of Immunological Interest, Fifth Edition, U.S. Department of Health and Human Services, NIH Publication No. 91-3242; and Chothia, C. et al. (1987) J. Mol. Biol. 196:901-917).

[0553] As used herein, “framework regions” or “FRs” are the domains within the antibody variable region domains that are located within the beta sheets; the FR regions are comparatively more conserved, in terms of their amino acid sequences, than the hypervariable regions. Each variable region contains four framework regions that separate the three hypervariable regions.

[0554] As used herein, a “constant region” domain is a domain in an antibody heavy or light chain that contains a sequence of amino acids that is comparatively more conserved among antibodies than the variable region domain. Each light chain has a single light chain constant region (C_{L}) domain, and each heavy chain contains one or more heavy chain constant region (C_{H}) domains, which include, C_{H}1, C_{H}2, C_{H}3 and C_{H}4. Full-length IgA, IgD and IgG isotypes contain C_{H}1, C_{H}2 and C_{H}3 domains and a hinge region, while IgE and IgM contain C_{H}1, C_{H}2, C_{H}3 and C_{H}4 domains. C_{H}1 and C_{L} domains extend the Fab arm of the antibody molecule, thus contributing to the interaction with the antigen and rotation of the antibody arms. Antibody constant regions can serve effector functions, such as, but not limited to, clearance of antigens, pathogens and toxins to which the antibody specifically binds, e.g., through interactions with various cells, biomolecules and tissues.

[0555] As used herein, an “antibody hinge region” or “hinge region” refers to a polypeptide region in the heavy chain of the gamma, delta and alpha antibody isotypes, that occurs between the C_{H}1 and C_{H}2 domains, joins the Fab and Fc regions, and has no homology with the other antibody domains. This region is rich in proline residues and provides flexibility to IgG, IgD and IgA antibodies, allowing the two “arms” (each containing one antibody combining site) of the Fab portion to be mobile, assuming various angles with respect to one another as they bind an antigen. This flexibility allows the Fab arms to move in order to align the antibody combining sites to interact with epitopes on cell surfaces or other antigens. Two interchain disulfide bonds within the hinge region stabilize the interaction between the two heavy chains. In some embodiments provided herein, the synthetically produced antibody fragments contain one or more hinge regions, for example, to promote stability via interactions between two antibody chains. Hinge regions are examples parts of dimerization domains, and, for purposes herein are part of the linkers.

[0556] As used herein, a “fragment crystallizable region” or “Fc” or “Fc region” or “Fc domain” refers to a polypeptide containing the constant region of an antibody heavy chain, excluding the first constant region immunoglobulin domain. Fc refers to the last two constant region immunoglobulin domains of IgA, IgD, and IgG (C_{H}2 and C_{H}3, also referred to as Cγ2 and Cγ3), or the last three constant region immunoglobulin domains of IgE and IgM (C_{H}2, C_{H}3 and C_{H}4). Optionally, an Fc domain can include all or part of the flexible hinge region, which is N-terminal to these domains. For IgA and IgM, the Fc can include the J chain. For an exemplary Fc domain of IgG, Fc contains immunoglobulin domains C_{H}2 and C_{H}3, and optionally, all or part of the hinge between C_{H}1 and C_{H}2 (also referred to as Cγ1 and Cγ2). The boundaries of the Fc region can vary, but typically, include at least part of the hinge region. For purposes herein, Fc also includes any allelic or species variant, or any variant or modified form, such as any variant or modified form of Fc that has altered binding to an Fc receptor (FcR) or alters an Fc-mediated effector function. Mutations in the Fc region and their effects are well-documented in the art.

[0557] As used herein, “Fc chimera” refers to a chimeric polypeptide in which one or more polypeptides is/are linked, directly or indirectly, to an Fc region or a derivative thereof. Typically, an Fc chimera combines the Fc region of an immunoglobulin with another polypeptide. Derivatives of, or modified Fc polypeptides, are known to those of skill in the art.

[0558] As used herein, “Kabat numbering” refers to the index numbering of the IgG1 Kabat antibody (see e.g., Kabat, E. A. et al. (1991) Sequences of Proteins of Immunological Interest, Fifth Edition, U.S. Department of Health and Human Services, NIH Publication No. 91-3242); it permits easy comparison among antibodies, similar to way chymotrypsin numbering permits comparison among proteases. One of skill in the art can identify regions of the constant region using Kabat numbering.

[0559] As used herein, “EU numbering” or “EU index” refer to the numbering scheme of the EU antibody described in Edelman et al., (1969) Proc. Natl. Acad. Sci. USA 63:78-85. “EU index as in Kabat” refers to EU index numbering of the human IgG1 Kabat antibody as set forth in Kabat, E. A. et al. (1991) Sequences of Proteins of Immunological Interest, Fifth Edition, U.S. Department of Health and Human Services, NIH Publication No. 91-3242. EU numbering, or EU numbering as in Kabat, are frequently used by those of skill in the art to number amino acid residues of the Fc regions of the light and heavy antibody chains. For example, one of skill in the art can identify regions of the constant region using EU numbering. For example, the C_{L} domain of the Ig kappa light chain corresponds to residues R108-C214 according to Kabat and EU numbering (see, e.g., Table 2 below). The C_{H}1 domain of IgG1 corresponds to residues 118-215 (EU numbering) or 114-223 (Kabat numbering); C_{H}2 corresponds to residues 231-340 (EU numbering) or 244-360 (Kabat numbering); C_{H}3 corresponds to residues 341-447 (EU numbering) or 361-478 (Kabat numbering).

[0560] The following tables define the numbering for the IgG1 and IgG4 heavy chain constant domains, and the Ig kappa light constant domain, by EU, Kabat, and sequential numbering. Table 1 shows the IgG1 heavy chain constant domain by EU, Kabat and sequential numbering, where sequential numbering is with respect to the sequence of amino acids set forth in SEQ ID NO:9, and identifies residues within the C_{H}1, C_{H}2 and C_{H}3 domains, as well as the hinge region. Table 2 shows the immunoglobulin (Ig) kappa light chain constant domain by EU, Kabat and sequential numbering, where sequential numbering is with respect to the sequence of amino acids set forth in SEQ ID NO:17. In Table 2, the top row (bold) sets forth the amino acid residue number by sequential numbering (with reference to SEQ ID NO:17); the second row (bold) provides the 1-letter code for the amino acid residue at the position indicated by the number in the top row; the third row (in italics) indicates the corresponding Kabat number according to Kabat numbering; and the fourth row indicates the corresponding EU index number according to EU numbering. Table 3 shows the IgG4 heavy chain constant domain by EU, Kabat and sequential numbering, where sequential numbering is with respect to the sequence of amino acids set forth in SEQ ID NO:15, and identifies residues within the C_{H}1, C_{H}2 and C_{H}3 domains, as well as the hinge region.

TABLE 1
IgG1 Heavy Chain Constant Domain by EU,
Kabat and Sequential Numbering

| | Residue Numbering | | | |
|---|---|---|---|---|
| | | | Sequential | |
| | EU | | (SEQ ID | IgG1 |
| Domain | Index | Kabat | NO: 9) | Sequence |
| CH1 | 118 | 114 | 1 | A |
| CH1 | 119 | 115 | 2 | S |
| CH1 | 120 | 116 | 3 | T |
| CH1 | 121 | 117 | 4 | K |
| CH1 | 122 | 118 | 5 | G |
| CH1 | 123 | 119 | 6 | P |
| CH1 | 124 | 120 | 7 | S |
| CH1 | 125 | 121 | 8 | V |
| CH1 | 126 | 122 | 9 | F |
| CH1 | 127 | 123 | 10 | P |
| CH1 | 128 | 124 | 11 | L |
| CH1 | 129 | 125 | 12 | A |
| CH1 | 130 | 126 | 13 | P |
| CH1 | 131 | 127 | 14 | S |
| CH1 | 132 | 128 | 15 | S |
| CH1 | 133 | 129 | 16 | K |
| CH1 | 134 | 130 | 17 | S |
| CH1 | 135 | 133 | 18 | T |
| CH1 | 136 | 134 | 19 | S |
| CH1 | 137 | 135 | 20 | G |
| CH1 | 138 | 136 | 21 | G |
| CH1 | 139 | 137 | 22 | T |
| CH1 | 140 | 138 | 23 | A |
| CH1 | 141 | 139 | 24 | A |
| CH1 | 142 | 140 | 25 | L |
| CH1 | 143 | 141 | 26 | G |
| CH1 | 144 | 142 | 27 | C |
| CH1 | 145 | 143 | 28 | L |
| CH1 | 146 | 144 | 29 | V |
| CH1 | 147 | 145 | 30 | K |
| CH1 | 148 | 146 | 31 | D |
| CH1 | 149 | 147 | 32 | Y |
| CH1 | 150 | 148 | 33 | F |
| CH1 | 151 | 149 | 34 | P |
| CH1 | 152 | 150 | 35 | E |
| CH1 | 153 | 151 | 36 | P |
| CH1 | 154 | 152 | 37 | V |
| CH1 | 155 | 153 | 38 | T |
| CH1 | 156 | 154 | 39 | V |
| CH1 | 157 | 156 | 40 | S |
| CH1 | 158 | 157 | 41 | W |
| CH1 | 159 | 162 | 42 | N |
| CH1 | 160 | 163 | 43 | S |
| CH1 | 161 | 164 | 44 | G |
| CH1 | 162 | 165 | 45 | A |
| CH1 | 163 | 166 | 46 | L |
| CH1 | 164 | 167 | 47 | T |
| CH1 | 165 | 168 | 48 | S |
| CH1 | 166 | 169 | 49 | G |
| CH1 | 167 | 171 | 50 | V |
| CH1 | 168 | 172 | 51 | H |
| CH1 | 169 | 173 | 52 | T |
| CH1 | 170 | 174 | 53 | F |
| CH1 | 171 | 175 | 54 | P |
| CH1 | 172 | 176 | 55 | A |
| CH1 | 173 | 177 | 56 | V |
| CH1 | 174 | 178 | 57 | L |
| CH1 | 175 | 179 | 58 | Q |
| CH1 | 176 | 180 | 59 | S |
| CH1 | 177 | 182 | 60 | S |
| CH1 | 178 | 183 | 61 | G |
| CH1 | 179 | 184 | 62 | L |
| CH1 | 180 | 185 | 63 | Y |
| CH1 | 181 | 186 | 64 | S |
| CH1 | 182 | 187 | 65 | L |
| CH1 | 183 | 188 | 66 | S |
| CH1 | 184 | 189 | 67 | S |
| CH1 | 185 | 190 | 68 | V |
| CH1 | 186 | 191 | 69 | V |
| CH1 | 187 | 192 | 70 | T |
| CH1 | 188 | 193 | 71 | V |
| CH1 | 189 | 194 | 72 | P |
| CH1 | 190 | 195 | 73 | S |
| CH1 | 191 | 196 | 74 | S |
| CH1 | 192 | 197 | 75 | S |
| CH1 | 193 | 198 | 76 | L |
| CH1 | 194 | 199 | 77 | G |
| CH1 | 195 | 200 | 78 | T |
| CH1 | 196 | 203 | 79 | Q |
| CH1 | 197 | 205 | 80 | T |
| CH1 | 198 | 206 | 81 | Y |
| CH1 | 199 | 207 | 82 | I |
| CH1 | 200 | 208 | 83 | C |
| CH1 | 201 | 209 | 84 | N |
| CH1 | 202 | 210 | 85 | V |
| CH1 | 203 | 211 | 86 | N |
| CH1 | 204 | 212 | 87 | H |
| CH1 | 205 | 213 | 88 | K |
| CH1 | 206 | 214 | 89 | P |
| CH1 | 207 | 215 | 90 | S |
| CH1 | 208 | 216 | 91 | N |
| CH1 | 209 | 217 | 92 | T |
| CH1 | 210 | 218 | 93 | K |
| CH1 | 211 | 219 | 94 | V |
| CH1 | 212 | 220 | 95 | D |
| CH1 | 213 | 221 | 96 | K |
| CH1 | 214 | 222 | 97 | K |
| CH1 | 215 | 223 | 98 | V |
| Hinge | 216 | 226 | 99 | E |
| Hinge | 217 | 227 | 100 | P |
| Hinge | 218 | 228 | 101 | K |
| Hinge | 219 | 232 | 102 | S |
| Hinge | 220 | 233 | 103 | C |
| Hinge | 221 | 234 | 104 | D |
| Hinge | 222 | 235 | 105 | K |
| Hinge | 223 | 236 | 106 | T |
| Hinge | 224 | 237 | 107 | H |
| Hinge | 225 | 238 | 108 | T |
| Hinge | 226 | 239 | 109 | C |
| Hinge | 227 | 240 | 110 | P |
| Hinge | 228 | 241 | 111 | P |
| Hinge | 229 | 242 | 112 | C |
| Hinge | 230 | 243 | 113 | P |
| CH2 | 231 | 244 | 114 | A |
| CH2 | 232 | 245 | 115 | P |
| CH2 | 233 | 246 | 116 | E |
| CH2 | 234 | 247 | 117 | L |
| CH2 | 235 | 248 | 118 | L |
| CH2 | 236 | 249 | 119 | G |
| CH2 | 237 | 250 | 120 | G |
| CH2 | 238 | 251 | 121 | P |
| CH2 | 239 | 252 | 122 | S |
| CH2 | 240 | 253 | 123 | V |
| CH2 | 241 | 254 | 124 | F |
| CH2 | 242 | 255 | 125 | L |
| CH2 | 243 | 256 | 126 | F |
| CH2 | 244 | 257 | 127 | P |
| CH2 | 245 | 258 | 128 | P |
| CH2 | 246 | 259 | 129 | K |
| CH2 | 247 | 260 | 130 | P |
| CH2 | 248 | 261 | 131 | K |
| CH2 | 249 | 262 | 132 | D |
| CH2 | 250 | 263 | 133 | T |
| CH2 | 251 | 264 | 134 | L |
| CH2 | 252 | 265 | 135 | M |
| CH2 | 253 | 266 | 136 | I |
| CH2 | 254 | 267 | 137 | S |
| CH2 | 255 | 268 | 138 | R |
| CH2 | 256 | 269 | 139 | T |
| CH2 | 257 | 270 | 140 | P |
| CH2 | 258 | 271 | 141 | E |
| CH2 | 259 | 272 | 142 | V |
| CH2 | 260 | 273 | 143 | T |
| CH2 | 261 | 274 | 144 | C |
| CH2 | 262 | 275 | 145 | V |
| CH2 | 263 | 276 | 146 | V |
| CH2 | 264 | 277 | 147 | V |
| CH2 | 265 | 278 | 148 | D |
| CH2 | 266 | 279 | 149 | V |
| CH2 | 267 | 280 | 150 | S |
| CH2 | 268 | 281 | 151 | H |
| CH2 | 269 | 282 | 152 | E |
| CH2 | 270 | 283 | 153 | D |
| CH2 | 271 | 284 | 154 | P |
| CH2 | 272 | 285 | 155 | E |
| CH2 | 273 | 286 | 156 | V |
| CH2 | 274 | 287 | 157 | K |
| CH2 | 275 | 288 | 158 | F |
| CH2 | 276 | 289 | 159 | N |
| CH2 | 277 | 290 | 160 | W |
| CH2 | 278 | 291 | 161 | Y |
| CH2 | 279 | 292 | 162 | V |
| CH2 | 280 | 295 | 163 | D |
| CH2 | 281 | 296 | 164 | G |
| CH2 | 282 | 299 | 165 | V |
| CH2 | 283 | 300 | 166 | E |
| CH2 | 284 | 301 | 167 | V |
| CH2 | 285 | 302 | 168 | H |
| CH2 | 286 | 303 | 169 | N |
| CH2 | 287 | 304 | 170 | A |
| CH2 | 288 | 305 | 171 | K |
| CH2 | 289 | 306 | 172 | T |
| CH2 | 290 | 307 | 173 | K |
| CH2 | 291 | 308 | 174 | P |
| CH2 | 292 | 309 | 175 | R |
| CH2 | 293 | 310 | 176 | E |
| CH2 | 294 | 311 | 177 | E |
| CH2 | 295 | 312 | 178 | Q |
| CH2 | 296 | 313 | 179 | Y |
| CH2 | 297 | 314 | 180 | N |
| CH2 | 298 | 317 | 181 | S |
| CH2 | 299 | 318 | 182 | T |
| CH2 | 300 | 319 | 183 | Y |
| CH2 | 301 | 320 | 184 | R |
| CH2 | 302 | 321 | 185 | V |
| CH2 | 303 | 322 | 186 | V |
| CH2 | 304 | 323 | 187 | S |
| CH2 | 305 | 324 | 188 | V |
| CH2 | 306 | 325 | 189 | L |
| CH2 | 307 | 326 | 190 | T |
| CH2 | 308 | 327 | 191 | V |
| CH2 | 309 | 328 | 192 | L |
| CH2 | 310 | 329 | 193 | H |
| CH2 | 311 | 330 | 194 | Q |
| CH2 | 312 | 331 | 195 | D |
| CH2 | 313 | 332 | 196 | W |
| CH2 | 314 | 333 | 197 | L |
| CH2 | 315 | 334 | 198 | N |
| CH2 | 316 | 335 | 199 | G |
| CH2 | 317 | 336 | 200 | K |
| CH2 | 318 | 337 | 201 | E |
| CH2 | 319 | 338 | 202 | Y |
| CH2 | 320 | 339 | 203 | K |
| CH2 | 321 | 340 | 204 | C |
| CH2 | 322 | 341 | 205 | K |
| CH2 | 323 | 342 | 206 | V |
| CH2 | 324 | 343 | 207 | S |
| CH2 | 325 | 344 | 208 | N |
| CH2 | 326 | 345 | 209 | K |
| CH2 | 327 | 346 | 210 | A |
| CH2 | 328 | 347 | 211 | L |
| CH2 | 329 | 348 | 212 | P |
| CH2 | 330 | 349 | 213 | A |
| CH2 | 331 | 350 | 214 | P |
| CH2 | 332 | 351 | 215 | I |
| CH2 | 333 | 352 | 216 | E |
| CH2 | 334 | 353 | 217 | K |
| CH2 | 335 | 354 | 218 | T |
| CH2 | 336 | 355 | 219 | I |
| CH2 | 337 | 357 | 220 | S |
| CH2 | 338 | 358 | 221 | K |
| CH2 | 339 | 359 | 222 | A |
| CH2 | 340 | 360 | 223 | K |
| CH3 | 341 | 361 | 224 | G |
| CH3 | 342 | 363 | 225 | Q |
| CH3 | 343 | 364 | 226 | P |
| CH3 | 344 | 365 | 227 | R |
| CH3 | 345 | 366 | 228 | E |
| CH3 | 346 | 367 | 229 | P |
| CH3 | 347 | 368 | 230 | Q |
| CH3 | 348 | 369 | 231 | V |
| CH3 | 349 | 370 | 232 | Y |
| CH3 | 350 | 371 | 233 | T |
| CH3 | 351 | 372 | 234 | L |
| CH3 | 352 | 373 | 235 | P |
| CH3 | 353 | 374 | 236 | P |
| CH3 | 354 | 375 | 237 | S |
| CH3 | 355 | 376 | 238 | R |
| CH3 | 356 | 377 | 239 | D |
| CH3 | 357 | 378 | 240 | E |
| CH3 | 358 | 381 | 241 | L |
| CH3 | 359 | 382 | 242 | T |
| CH3 | 360 | 383 | 243 | K |
| CH3 | 361 | 384 | 244 | N |
| CH3 | 362 | 385 | 245 | Q |
| CH3 | 363 | 386 | 246 | V |
| CH3 | 364 | 387 | 247 | S |
| CH3 | 365 | 388 | 248 | L |
| CH3 | 366 | 389 | 249 | T |
| CH3 | 367 | 390 | 250 | C |
| CH3 | 368 | 391 | 251 | L |
| CH3 | 369 | 392 | 252 | V |
| CH3 | 370 | 393 | 253 | K |
| CH3 | 371 | 394 | 254 | G |
| CH3 | 372 | 395 | 255 | F |
| CH3 | 373 | 396 | 256 | Y |
| CH3 | 374 | 397 | 257 | P |
| CH3 | 375 | 398 | 258 | S |
| CH3 | 376 | 399 | 259 | D |
| CH3 | 377 | 400 | 260 | I |
| CH3 | 378 | 401 | 261 | A |
| CH3 | 379 | 402 | 262 | V |
| CH3 | 380 | 405 | 263 | E |
| CH3 | 381 | 406 | 264 | W |
| CH3 | 382 | 407 | 265 | E |
| CH3 | 383 | 408 | 266 | S |
| CH3 | 384 | 410 | 267 | N |
| CH3 | 385 | 411 | 268 | G |
| CH3 | 386 | 414 | 269 | Q |
| CH3 | 387 | 415 | 270 | P |
| CH3 | 388 | 416 | 271 | E |
| CH3 | 389 | 417 | 272 | N |
| CH3 | 390 | 418 | 273 | N |
| CH3 | 391 | 419 | 274 | Y |
| CH3 | 392 | 420 | 275 | K |
| CH3 | 393 | 421 | 276 | T |
| CH3 | 394 | 422 | 277 | T |
| CH3 | 395 | 423 | 278 | P |
| CH3 | 396 | 424 | 279 | P |
| CH3 | 397 | 425 | 280 | V |
| CH3 | 398 | 426 | 281 | L |
| CH3 | 399 | 427 | 282 | D |
| CH3 | 400 | 428 | 283 | S |
| CH3 | 401 | 430 | 284 | D |
| CH3 | 402 | 433 | 285 | G |
| CH3 | 403 | 434 | 286 | S |
| CH3 | 404 | 435 | 287 | F |
| CH3 | 405 | 436 | 288 | F |
| CH3 | 406 | 437 | 289 | L |
| CH3 | 407 | 438 | 290 | Y |
| CH3 | 408 | 439 | 291 | S |
| CH3 | 409 | 440 | 292 | K |
| CH3 | 410 | 441 | 293 | L |
| CH3 | 411 | 442 | 294 | T |
| CH3 | 412 | 443 | 295 | V |
| CH3 | 413 | 444 | 296 | D |
| CH3 | 414 | 445 | 297 | K |
| CH3 | 415 | 446 | 298 | S |
| CH3 | 416 | 447 | 299 | R |
| CH3 | 417 | 448 | 300 | W |
| CH3 | 418 | 449 | 301 | Q |
| CH3 | 419 | 450 | 302 | Q |
| CH3 | 420 | 451 | 303 | G |
| CH3 | 421 | 452 | 304 | N |
| CH3 | 422 | 453 | 305 | V |
| CH3 | 423 | 454 | 306 | F |
| CH3 | 424 | 455 | 307 | S |
| CH3 | 425 | 456 | 308 | C |
| CH3 | 426 | 457 | 309 | S |
| CH3 | 427 | 458 | 310 | V |
| CH3 | 428 | 459 | 311 | M |
| CH3 | 429 | 460 | 312 | H |
| CH3 | 430 | 461 | 313 | E |
| CH3 | 431 | 462 | 314 | A |
| CH3 | 432 | 463 | 315 | L |
| CH3 | 433 | 464 | 316 | H |
| CH3 | 434 | 465 | 317 | N |
| CH3 | 435 | 466 | 318 | H |
| CH3 | 436 | 467 | 319 | Y |
| CH3 | 437 | 468 | 320 | T |
| CH3 | 438 | 469 | 321 | Q |
| CH3 | 439 | 470 | 322 | K |
| CH3 | 440 | 471 | 323 | S |
| CH3 | 441 | 472 | 324 | L |
| CH3 | 442 | 473 | 325 | S |
| CH3 | 443 | 474 | 326 | L |
| CH3 | 444 | 475 | 327 | S |
| CH3 | 445 | 476 | 328 | P |
| CH3 | 446 | 477 | 329 | G |
| CH3 | 447 | 478 | 330 | K |

TABLE 2
Kabat and EU Numbering of Ig Kappa Light Chain Constant Domain

| | | | | | | | | | | | | | | |
|---|---|---|---|---|---|---|---|---|---|---|---|---|---|---|
| 1 | 2 | 3 | 4 | 5 | 6 | 7 | 8 | 9 | 10 | 11 | 12 | 13 | 14 | 15 |
| R | T | V | A | A | P | S | V | F | I | F | P | P | S | D |
| 108 | 109 | 110 | 111 | 112 | 113 | 114 | 115 | 116 | 117 | 118 | 119 | 120 | 121 | 122 |
| 108 | 109 | 110 | 111 | 112 | 113 | 114 | 115 | 116 | 117 | 118 | 119 | 120 | 121 | 122 |
| 16 | 17 | 18 | 19 | 20 | 21 | 22 | 23 | 24 | 25 | 26 | 27 | 28 | 29 | 30 |
| E | Q | L | K | S | G | T | A | S | V | V | C | L | L | N |
| 123 | 124 | 125 | 126 | 127 | 128 | 129 | 130 | 131 | 132 | 133 | 134 | 135 | 136 | 137 |
| 123 | 124 | 125 | 126 | 127 | 128 | 129 | 130 | 131 | 132 | 133 | 134 | 135 | 136 | 137 |
| 31 | 32 | 33 | 34 | 35 | 36 | 37 | 38 | 39 | 40 | 41 | 42 | 43 | 44 | 45 |
| N | F | Y | P | R | E | A | K | V | Q | W | K | V | D | N |
| 138 | 139 | 140 | 141 | 142 | 143 | 144 | 145 | 146 | 147 | 148 | 149 | 150 | 151 | 152 |
| 138 | 139 | 140 | 141 | 142 | 143 | 144 | 145 | 146 | 147 | 148 | 149 | 150 | 151 | 152 |
| 46 | 47 | 48 | 49 | 50 | 51 | 52 | 53 | 54 | 55 | 56 | 57 | 58 | 59 | 60 |
| A | L | Q | S | G | N | S | Q | E | S | V | T | E | Q | D |
| 153 | 154 | 155 | 156 | 157 | 158 | 159 | 160 | 161 | 162 | 163 | 164 | 165 | 166 | 167 |
| 153 | 154 | 155 | 156 | 157 | 158 | 159 | 160 | 161 | 162 | 163 | 164 | 165 | 166 | 167 |
| 61 | 62 | 63 | 64 | 65 | 66 | 67 | 68 | 69 | 70 | 71 | 72 | 73 | 74 | 75 |
| S | K | D | S | T | Y | S | L | S | S | T | L | T | L | S |
| 168 | 169 | 170 | 171 | 172 | 173 | 174 | 175 | 176 | 177 | 178 | 179 | 180 | 181 | 182 |
| 168 | 169 | 170 | 171 | 172 | 173 | 174 | 175 | 176 | 177 | 178 | 179 | 180 | 181 | 182 |
| 76 | 77 | 78 | 79 | 80 | 81 | 82 | 83 | 84 | 85 | 86 | 87 | 88 | 89 | 90 |
| K | A | D | Y | E | K | H | K | V | Y | A | C | E | V | T |
| 183 | 184 | 185 | 186 | 187 | 188 | 189 | 190 | 191 | 192 | 193 | 194 | 195 | 196 | 197 |
| 183 | 184 | 185 | 186 | 187 | 188 | 189 | 190 | 191 | 192 | 193 | 194 | 195 | 196 | 197 |
| 91 | 92 | 93 | 94 | 95 | 96 | 97 | 98 | 99 | 100 | 101 | 102 | 103 | 104 | 105 |
| H | Q | G | L | S | S | P | V | T | K | S | F | N | R | G |
| 198 | 199 | 200 | 201 | 202 | 203 | 204 | 205 | 206 | 207 | 208 | 209 | 210 | 211 | 212 |
| 198 | 199 | 200 | 201 | 202 | 203 | 204 | 205 | 206 | 207 | 208 | 209 | 210 | 211 | 212 |

| | |
|---|---|
| 106 | 107 |
| E | C |
| 213 | 214 |
| 213 | 214 |

TABLE 3
IgG4 Heavy Chain Constant Domain by EU, Kabat
and Sequential Numbering

| | Residue Numbering | | | |
|---|---|---|---|---|
| | | | Sequential | |
| | EU | | (SEQ ID | IgG4 |
| Domain | Index | Kabat | NO: 15) | Sequence |
| CH1 | 118 | 114 | 1 | A |
| CH1 | 119 | 115 | 2 | S |
| CH1 | 120 | 116 | 3 | T |
| CH1 | 121 | 117 | 4 | K |
| CH1 | 122 | 118 | 5 | G |
| CH1 | 123 | 119 | 6 | P |
| CH1 | 124 | 120 | 7 | S |
| CH1 | 125 | 121 | 8 | V |
| CH1 | 126 | 122 | 9 | F |
| CH1 | 127 | 123 | 10 | P |
| CH1 | 128 | 124 | 11 | L |
| CH1 | 129 | 125 | 12 | A |
| CH1 | 130 | 126 | 13 | P |
| CH1 | 131 | 127 | 14 | C |
| CH1 | 132 | 128 | 15 | S |
| CH1 | 133 | 129 | 16 | R |
| CH1 | 134 | 130 | 17 | S |
| CH1 | 135 | 133 | 18 | T |
| CH1 | 136 | 134 | 19 | S |
| CH1 | 137 | 135 | 20 | E |
| CH1 | 138 | 136 | 21 | S |
| CH1 | 139 | 137 | 22 | T |
| CH1 | 140 | 138 | 23 | A |
| CH1 | 141 | 139 | 24 | A |
| CH1 | 142 | 140 | 25 | L |
| CH1 | 143 | 141 | 26 | G |
| CH1 | 144 | 142 | 27 | C |
| CH1 | 145 | 143 | 28 | L |
| CH1 | 146 | 144 | 29 | V |
| CH1 | 147 | 145 | 30 | K |
| CH1 | 148 | 146 | 31 | D |
| CH1 | 149 | 147 | 32 | Y |
| CH1 | 150 | 148 | 33 | F |
| CH1 | 151 | 149 | 34 | P |
| CH1 | 152 | 150 | 35 | E |
| CH1 | 153 | 151 | 36 | P |
| CH1 | 154 | 152 | 37 | V |
| CH1 | 155 | 153 | 38 | T |
| CH1 | 156 | 154 | 39 | V |
| CH1 | 157 | 156 | 40 | S |
| CH1 | 158 | 157 | 41 | W |
| CH1 | 159 | 162 | 42 | N |
| CH1 | 160 | 163 | 43 | S |
| CH1 | 161 | 164 | 44 | G |
| CH1 | 162 | 165 | 45 | A |
| CH1 | 163 | 166 | 46 | L |
| CH1 | 164 | 167 | 47 | T |
| CH1 | 165 | 168 | 48 | S |
| CH1 | 166 | 169 | 49 | G |
| CH1 | 167 | 171 | 50 | V |
| CH1 | 168 | 172 | 51 | H |
| CH1 | 169 | 173 | 52 | T |
| CH1 | 170 | 174 | 53 | F |
| CH1 | 171 | 175 | 54 | P |
| CH1 | 172 | 176 | 55 | A |
| CH1 | 173 | 177 | 56 | V |
| CH1 | 174 | 178 | 57 | L |
| CH1 | 175 | 179 | 58 | Q |
| CH1 | 176 | 180 | 59 | S |
| CH1 | 177 | 182 | 60 | S |
| CH1 | 178 | 183 | 61 | G |
| CH1 | 179 | 184 | 62 | L |
| CH1 | 180 | 185 | 63 | Y |
| CH1 | 181 | 186 | 64 | S |
| CH1 | 182 | 187 | 65 | L |
| CH1 | 183 | 188 | 66 | S |
| CH1 | 184 | 189 | 67 | S |
| CH1 | 185 | 190 | 68 | V |
| CH1 | 186 | 191 | 69 | V |
| CH1 | 187 | 192 | 70 | T |
| CH1 | 188 | 193 | 71 | V |
| CH1 | 189 | 194 | 72 | P |
| CH1 | 190 | 195 | 73 | S |
| CH1 | 191 | 196 | 74 | S |
| CH1 | 192 | 197 | 75 | S |
| CH1 | 193 | 198 | 76 | L |
| CH1 | 194 | 199 | 77 | G |
| CH1 | 195 | 200 | 78 | T |
| CH1 | 196 | 203 | 79 | K |
| CH1 | 197 | 205 | 80 | T |
| CH1 | 198 | 206 | 81 | Y |
| CH1 | 199 | 207 | 82 | T |
| CH1 | 200 | 208 | 83 | C |
| CH1 | 201 | 209 | 84 | N |
| CH1 | 202 | 210 | 85 | V |
| CH1 | 203 | 211 | 86 | D |
| CH1 | 204 | 212 | 87 | H |
| CH1 | 205 | 213 | 88 | K |
| CH1 | 206 | 214 | 89 | P |
| CH1 | 207 | 215 | 90 | S |
| CH1 | 208 | 216 | 91 | N |
| CH1 | 209 | 217 | 92 | T |
| CH1 | 210 | 218 | 93 | K |
| CH1 | 211 | 219 | 94 | V |
| CH1 | 212 | 220 | 95 | D |
| CH1 | 213 | 221 | 96 | K |
| CH1 | 214 | 222 | 97 | R |
| CH1 | 215 | 223 | 98 | V |
| Hinge | 216 | 226 | 99 | E |
| Hinge | 217 | 227 | 100 | S |
| Hinge | 218 | 228 | 101 | K |
| Hinge | 219 | 229 | 102 | Y |
| Hinge | 220 | 230 | 103 | G |
| Hinge | 224 | 237 | 104 | P |
| Hinge | 225 | 238 | 105 | P |
| Hinge | 226 | 239 | 106 | C |
| Hinge | 227 | 240 | 107 | P |
| Hinge | 228 | 241 | 108 | S |
| Hinge | 229 | 242 | 109 | C |
| Hinge | 230 | 243 | 110 | P |
| CH2 | 231 | 244 | 111 | A |
| CH2 | 232 | 245 | 112 | P |
| CH2 | 233 | 246 | 113 | E |
| CH2 | 234 | 247 | 114 | F |
| CH2 | 235 | 248 | 115 | L |
| CH2 | 236 | 249 | 116 | G |
| CH2 | 237 | 250 | 117 | G |
| CH2 | 238 | 251 | 118 | P |
| CH2 | 239 | 252 | 119 | S |
| CH2 | 240 | 253 | 120 | V |
| CH2 | 241 | 254 | 121 | F |
| CH2 | 242 | 255 | 122 | L |
| CH2 | 243 | 256 | 123 | F |
| CH2 | 244 | 257 | 124 | P |
| CH2 | 245 | 258 | 125 | P |
| CH2 | 246 | 259 | 126 | K |
| CH2 | 247 | 260 | 127 | P |
| CH2 | 248 | 261 | 128 | K |
| CH2 | 249 | 262 | 129 | D |
| CH2 | 250 | 263 | 130 | T |
| CH2 | 251 | 264 | 131 | L |
| CH2 | 252 | 265 | 132 | M |
| CH2 | 253 | 266 | 133 | I |
| CH2 | 254 | 267 | 134 | S |
| CH2 | 255 | 268 | 135 | R |
| CH2 | 256 | 269 | 136 | T |
| CH2 | 257 | 270 | 137 | P |
| CH2 | 258 | 271 | 138 | E |
| CH2 | 259 | 272 | 139 | V |
| CH2 | 260 | 273 | 140 | T |
| CH2 | 261 | 274 | 141 | C |
| CH2 | 262 | 275 | 142 | V |
| CH2 | 263 | 276 | 143 | V |
| CH2 | 264 | 277 | 144 | V |
| CH2 | 265 | 278 | 145 | D |
| CH2 | 266 | 279 | 146 | V |
| CH2 | 267 | 280 | 147 | S |
| CH2 | 268 | 281 | 148 | Q |
| CH2 | 269 | 282 | 149 | E |
| CH2 | 270 | 283 | 150 | D |
| CH2 | 271 | 284 | 151 | P |
| CH2 | 272 | 285 | 152 | E |
| CH2 | 273 | 286 | 153 | V |
| CH2 | 274 | 287 | 154 | Q |
| CH2 | 275 | 288 | 155 | F |
| CH2 | 276 | 289 | 156 | N |
| CH2 | 277 | 290 | 157 | W |
| CH2 | 278 | 291 | 158 | Y |
| CH2 | 279 | 292 | 159 | V |
| CH2 | 280 | 295 | 160 | D |
| CH2 | 281 | 296 | 161 | G |
| CH2 | 282 | 299 | 162 | V |
| CH2 | 283 | 300 | 163 | E |
| CH2 | 284 | 301 | 164 | V |
| CH2 | 285 | 302 | 165 | H |
| CH2 | 286 | 303 | 166 | N |
| CH2 | 287 | 304 | 167 | A |
| CH2 | 288 | 305 | 168 | K |
| CH2 | 289 | 306 | 169 | T |
| CH2 | 290 | 307 | 170 | K |
| CH2 | 291 | 308 | 171 | P |
| CH2 | 292 | 309 | 172 | R |
| CH2 | 293 | 310 | 173 | E |
| CH2 | 294 | 311 | 174 | E |
| CH2 | 295 | 312 | 175 | Q |
| CH2 | 296 | 313 | 176 | F |
| CH2 | 297 | 314 | 177 | N |
| CH2 | 298 | 317 | 178 | S |
| CH2 | 299 | 318 | 179 | T |
| CH2 | 300 | 319 | 180 | Y |
| CH2 | 301 | 320 | 181 | R |
| CH2 | 302 | 321 | 182 | V |
| CH2 | 303 | 322 | 183 | V |
| CH2 | 304 | 323 | 184 | S |
| CH2 | 305 | 324 | 185 | V |
| CH2 | 306 | 325 | 186 | L |
| CH2 | 307 | 326 | 187 | T |
| CH2 | 308 | 327 | 188 | V |
| CH2 | 309 | 328 | 189 | L |
| CH2 | 310 | 329 | 190 | H |
| CH2 | 311 | 330 | 191 | Q |
| CH2 | 312 | 331 | 192 | D |
| CH2 | 313 | 332 | 193 | W |
| CH2 | 314 | 333 | 194 | L |
| CH2 | 315 | 334 | 195 | N |
| CH2 | 316 | 335 | 196 | G |
| CH2 | 317 | 336 | 197 | K |
| CH2 | 318 | 337 | 198 | E |
| CH2 | 319 | 338 | 199 | Y |
| CH2 | 320 | 339 | 200 | K |
| CH2 | 321 | 340 | 201 | C |
| CH2 | 322 | 341 | 202 | K |
| CH2 | 323 | 342 | 203 | V |
| CH2 | 324 | 343 | 204 | S |
| CH2 | 325 | 344 | 205 | N |
| CH2 | 326 | 345 | 206 | K |
| CH2 | 327 | 346 | 207 | G |
| CH2 | 328 | 347 | 208 | L |
| CH2 | 329 | 348 | 209 | P |
| CH2 | 330 | 349 | 210 | S |
| CH2 | 331 | 350 | 211 | S |
| CH2 | 332 | 351 | 212 | I |
| CH2 | 333 | 352 | 213 | E |
| CH2 | 334 | 353 | 214 | K |
| CH2 | 335 | 354 | 215 | T |
| CH2 | 336 | 355 | 216 | I |
| CH2 | 337 | 357 | 217 | S |
| CH2 | 338 | 358 | 218 | K |
| CH2 | 339 | 359 | 219 | A |
| CH2 | 340 | 360 | 220 | K |
| CH3 | 341 | 361 | 221 | G |
| CH3 | 342 | 363 | 222 | Q |
| CH3 | 343 | 364 | 223 | P |
| CH3 | 344 | 365 | 224 | R |
| CH3 | 345 | 366 | 225 | E |
| CH3 | 346 | 367 | 226 | P |
| CH3 | 347 | 368 | 227 | Q |
| CH3 | 348 | 369 | 228 | V |
| CH3 | 349 | 370 | 229 | Y |
| CH3 | 350 | 371 | 230 | T |
| CH3 | 351 | 372 | 231 | L |
| CH3 | 352 | 373 | 232 | P |
| CH3 | 353 | 374 | 233 | P |
| CH3 | 354 | 375 | 234 | S |
| CH3 | 355 | 376 | 235 | Q |
| CH3 | 356 | 377 | 236 | E |
| CH3 | 357 | 378 | 237 | E |
| CH3 | 358 | 381 | 238 | M |
| CH3 | 359 | 382 | 239 | T |
| CH3 | 360 | 383 | 240 | K |
| CH3 | 361 | 384 | 241 | N |
| CH3 | 362 | 385 | 242 | Q |
| CH3 | 363 | 386 | 243 | V |
| CH3 | 364 | 387 | 244 | S |
| CH3 | 365 | 388 | 245 | L |
| CH3 | 366 | 389 | 246 | T |
| CH3 | 367 | 390 | 247 | C |
| CH3 | 368 | 391 | 248 | L |
| CH3 | 369 | 392 | 249 | V |
| CH3 | 370 | 393 | 250 | K |
| CH3 | 371 | 394 | 251 | G |
| CH3 | 372 | 395 | 252 | F |
| CH3 | 373 | 396 | 253 | Y |
| CH3 | 374 | 397 | 254 | P |
| CH3 | 375 | 398 | 255 | S |
| CH3 | 376 | 399 | 256 | D |
| CH3 | 377 | 400 | 257 | I |
| CH3 | 378 | 401 | 258 | A |
| CH3 | 379 | 402 | 259 | V |
| CH3 | 380 | 405 | 260 | E |
| CH3 | 381 | 406 | 261 | W |
| CH3 | 382 | 407 | 262 | E |
| CH3 | 383 | 408 | 263 | S |
| CH3 | 384 | 410 | 264 | N |
| CH3 | 385 | 411 | 265 | G |
| CH3 | 386 | 414 | 266 | Q |
| CH3 | 387 | 415 | 267 | P |
| CH3 | 388 | 416 | 268 | E |
| CH3 | 389 | 417 | 269 | N |
| CH3 | 390 | 418 | 270 | N |
| CH3 | 391 | 419 | 271 | Y |
| CH3 | 392 | 420 | 272 | K |
| CH3 | 393 | 421 | 273 | T |
| CH3 | 394 | 422 | 274 | T |
| CH3 | 395 | 423 | 275 | P |
| CH3 | 396 | 424 | 276 | P |
| CH3 | 397 | 425 | 277 | V |
| CH3 | 398 | 426 | 278 | L |
| CH3 | 399 | 427 | 279 | D |
| CH3 | 400 | 428 | 280 | S |
| CH3 | 401 | 430 | 281 | D |
| CH3 | 402 | 433 | 282 | G |
| CH3 | 403 | 434 | 283 | S |
| CH3 | 404 | 435 | 284 | F |
| CH3 | 405 | 436 | 285 | F |
| CH3 | 406 | 437 | 286 | L |
| CH3 | 407 | 438 | 287 | Y |
| CH3 | 408 | 439 | 288 | S |
| CH3 | 409 | 440 | 289 | R |
| CH3 | 410 | 441 | 290 | L |
| CH3 | 411 | 442 | 291 | T |
| CH3 | 412 | 443 | 292 | V |
| CH3 | 413 | 444 | 293 | D |
| CH3 | 414 | 445 | 294 | K |
| CH3 | 415 | 446 | 295 | S |
| CH3 | 416 | 447 | 296 | R |
| CH3 | 417 | 448 | 297 | W |
| CH3 | 418 | 449 | 298 | Q |
| CH3 | 419 | 450 | 299 | E |
| CH3 | 420 | 451 | 300 | G |
| CH3 | 421 | 452 | 301 | N |
| CH3 | 422 | 453 | 302 | V |
| CH3 | 423 | 454 | 303 | F |
| CH3 | 424 | 455 | 304 | S |
| CH3 | 425 | 456 | 305 | C |
| CH3 | 426 | 457 | 306 | S |
| CH3 | 427 | 458 | 307 | V |
| CH3 | 428 | 459 | 308 | M |
| CH3 | 429 | 460 | 309 | H |
| CH3 | 430 | 461 | 310 | E |
| CH3 | 431 | 462 | 311 | A |
| CH3 | 432 | 463 | 312 | L |
| CH3 | 433 | 464 | 313 | H |
| CH3 | 434 | 465 | 314 | N |
| CH3 | 435 | 466 | 315 | H |
| CH3 | 436 | 467 | 316 | Y |
| CH3 | 437 | 468 | 317 | T |
| CH3 | 438 | 469 | 318 | Q |
| CH3 | 439 | 470 | 319 | K |
| CH3 | 440 | 471 | 320 | S |
| CH3 | 441 | 472 | 321 | L |
| CH3 | 442 | 473 | 322 | S |
| CH3 | 443 | 474 | 323 | L |
| CH3 | 444 | 475 | 324 | S |
| CH3 | 445 | 476 | 325 | L |
| CH3 | 446 | 477 | 326 | G |
| CH3 | 447 | 478 | 327 | K |

[0561] As used herein, the phrase “derived from,” when referring to antibody fragments derived from another antibody, such as a monoclonal antibody, refers to the engineering of antibody fragments (e.g., Fab, F(ab′), F(ab′)₂, single-chain Fv (scFv), Fv, dsFv, dAb, diabody, Fd and Fd′ fragments) that retain the binding specificity of the original antibody. Such fragments can be derived by a variety of methods known in the art, including, but not limited to, enzymatic cleavage, chemical crosslinking, recombinant means, or combinations thereof. Generally, the derived antibody fragment shares the identical, or substantially identical, heavy chain variable region (V_{H}) and light chain variable region (V_{L}) of the parent antibody, such that the antibody fragment and the parent antibody bind the same epitope.

[0562] As used herein, a “parent antibody” or “source antibody” refers to an antibody from which an antibody fragment (e.g., Fab, F(ab′), F(ab)₂, single-chain Fv (scFv), Fv, dsFv, dAb, diabody, Fd and Fd′ fragments) is derived.

[0563] As used herein, the term “epitope” refers to any antigenic determinant on an antigen or protein, to which the paratope of an antibody can bind. Epitopic determinants typically contain chemically active surface groupings of molecules, such as amino acids or sugar side chains, and typically have specific three-dimensional structural characteristics, as well as specific charge characteristics.

[0564] As used herein, “humanized antibodies” and human therapeutics refer to antibodies and other protein therapeutics that are modified to include “human” sequences of amino acids, so that administration to a human does not provoke an immune response. A humanized antibody, for example, typically contains complementarity determining regions (CDRs or hypervariable loops) derived from a non-human species immunoglobulin, and the remainder of the antibody molecule derived mainly from a human immunoglobulin. Methods for humanizing proteins, including antibodies, and producing them are well known and readily available to those of skill in the art. For example, DNA encoding a monoclonal antibody can be altered by recombinant DNA techniques to encode an antibody in which the amino acid composition of the non-variable regions is based on human antibodies. Methods for identifying such regions are known, including computer programs, which are designed for identifying the variable and non-variable regions of immunoglobulins. Hence, in general, the humanized antibody contains substantially all of at least one, and typically two, variable domains, in which all or substantially all of the hypervariable loops (e.g., CDRs) correspond to those of a non-human immunoglobulin, and all or substantially all of the framework regions (FRs) are those of a human immunoglobulin sequence. The humanized antibody, optionally, also contains at least a portion of an immunoglobulin constant region (Fc), typically that of a human immunoglobulin.

[0565] As used herein, a “multimerization domain” refers to a sequence of amino acids that promotes stable interaction of a polypeptide molecule with one or more additional polypeptide molecules, each containing a complementary multimerization domain, which can be the same or a different multimerization domain, to form a stable multimer with the first domain. Generally, a polypeptide is joined directly or indirectly to the multimerization domain. Exemplary multimerization domains include the immunoglobulin sequences or portions thereof, leucine zippers, hydrophobic regions, hydrophilic regions, and compatible protein-protein interaction domains. The multimerization domain, for example, can be an immunoglobulin constant region or domain, such as, for example, the Fc domain or portions thereof from IgG, including IgG1, IgG2, IgG3 or IgG4 subtypes, IgA, IgE, IgD and IgM, and modified forms thereof.

[0566] As used herein, “dimerization domains” are multimerization domains that facilitate interaction between two polypeptide sequences (such as, but not limited to, antibody chains). Dimerization domains include, but are not limited to, an amino acid sequence containing a cysteine residue that facilitates the formation of a disulfide bond between two polypeptide sequences, such as all or a part of a full-length antibody hinge region, or one or more dimerization sequences, which are sequences of amino acids known to promote interaction between polypeptides (e.g., leucine zippers, GCN4 zippers).

[0567] As used herein, a “chimeric polypeptide” refers to a polypeptide that contains portions from at least two different polypeptides or from two non-contiguous portions of a single polypeptide. Thus, a chimeric polypeptide generally includes a sequence of amino acid residues from all or a part of one polypeptide, and a sequence of amino acids from all or a part of another different polypeptide. The two portions can be linked directly or indirectly and can be linked via peptide bonds, other covalent bonds, or other non-covalent interactions of sufficient strength to maintain the integrity of a substantial portion of the chimeric polypeptide under equilibrium conditions and physiologic conditions, such as in isotonic pH 7 buffered saline.

[0568] As used herein, a “fusion protein” is a polypeptide engineered to contain sequences of amino acids corresponding to two distinct polypeptides, which are joined together, such as by expressing the fusion protein from a vector containing two nucleic acids, encoding the two polypeptides, in close proximity, e.g., adjacent, to one another along the length of the vector. Accordingly, a fusion protein refers to a chimeric protein containing two, or portions from two, or more proteins or peptides that are linked directly or indirectly via peptide bonds. The two molecules can be adjacent in the construct, or can be separated by a linker, or spacer polypeptide.

[0569] As used herein, a “linker,” “linker unit,” or “link,” refers to a peptide or chemical moiety containing a chain of atoms that covalently attaches an antibody or antigen-binding fragment thereof to another therapeutic moiety or another antibody or fragment thereof. Linkers are included, for example, to increase flexibility, modify steric effects, including steric hindrance, and increase solubility in aqueous medium.

[0570] As used herein, a “linker peptide” or “spacer peptide” refers to short sequences of amino acids that join two polypeptide sequences (or nucleic acids encoding such as an amino acid sequence). “Peptide linker” refers to the short sequence of amino acids joining the two polypeptide sequences. Exemplary of polypeptide linkers are linkers joining a peptide transduction domain to an antibody, or linkers joining two antibody chains in a synthetic antibody fragment, such as an scFv fragment. Linkers are well-known, and any known linkers can be used in the provided methods. Exemplary polypeptide linkers include (Gly-Ser)ₙ amino acid sequences, with some Glu or Lys residues dispersed throughout to increase solubility. Other exemplary linkers are described herein; any of these and other known linkers can be used with the polypeptides, antibodies, and other products and methods provided herein.

[0571] As used herein, a “tag” or an “epitope tag” refers to a sequence of amino acids, typically added to the N- or C-terminus of a polypeptide, such as an antibody and an antibody fragment/construct, provided herein. The inclusion of tags fused to a polypeptide can facilitate polypeptide purification and/or detection. Typically, a tag or tag polypeptide refers to a polypeptide that has enough residues to provide an epitope recognized by an antibody, or that can serve for detection or purification, yet is short enough such that it does not interfere with activity of the polypeptide to which it is linked. The tag polypeptide typically is sufficiently unique so that an antibody that specifically binds thereto does not substantially cross-react with epitopes in the polypeptide to which it is linked. Suitable tag polypeptides generally have at least 5 or 6 amino acid residues, and usually between about 8-50 amino acid residues, typically between 9-30 residues. The tags can be linked to one or more chimeric polypeptides in a multimer and permit detection of the multimer or its recovery from a sample or mixture. Such tags are well-known and can be readily synthesized and designed. Exemplary tag polypeptides include those used for affinity purification and include, for example, FLAG tags; His tags; the influenza hemagglutinin (HA) tag polypeptide and its antibody 12CA5 (see, e.g., Field et al. (1988) Mol. Cell. Biol. 8:2159-2165); the c-myc tag and the 8F9, 3C7, 6E10, G4, B7 and 9E10 antibodies thereto (see, e.g., Evan et al. (1985) Molecular and Cellular Biology 5:3610-3616); and the Herpes Simplex virus glycoprotein D (gD) tag and its antibody (see, e.g., Paborsky et al. (1990) Protein Engineering 3:547-553). An antibody used to detect an epitope-tagged antibody is typically referred to herein as a secondary antibody.

[0572] As used herein, a “label” or “detectable moiety” is a detectable marker (e.g., a fluorescent molecule, chemiluminescent molecule, bioluminescent molecule, contrast agent (e.g., a metal), radionuclide, chromophore, detectable peptide, or an enzyme that catalyzes the formation of a detectable product) that can be attached or linked directly or indirectly to a molecule (e.g., an antibody or antigen-binding fragment thereof, such as an anti-TNFR1 antibody or antigen-binding fragment thereof provided herein), or associated therewith, and can be detected in vivo and/or in vitro. The detection method can be any method known in the art, including known in vivo and/or in vitro methods of detection (e.g., imaging by visual inspection, magnetic resonance (MR) spectroscopy, ultrasound signal, X-ray, gamma ray spectroscopy (e.g., positron emission tomography (PET) scanning, single-photon emission computed tomography (SPECT)), fluorescence spectroscopy, or absorption). Indirect detection refers to measurement of a physical phenomenon, such as energy or particle emission or absorption, of an atom, molecule or composition that binds directly or indirectly to the detectable moiety (e.g., detection of a labeled secondary antibody or antigen-binding fragment thereof that binds to a primary antibody (e.g., an anti-TNFR antibody or antigen-binding fragment thereof provided herein)).

[0573] As used herein, “nucleic acid” refers to at least two linked nucleotides or nucleotide derivatives, including a deoxyribonucleic acid (DNA) and a ribonucleic acid (RNA), joined together, typically by phosphodiester linkages. Also included in the term “nucleic acid” are analogs of nucleic acids, such as peptide nucleic acid (PNA), phosphorothioate DNA, and other such analogs and derivatives or combinations thereof. Nucleic acids also include DNA and RNA derivatives containing, for example, a nucleotide analog or a “backbone” bond other than a phosphodiester bond, for example, a phosphotriester bond, a phosphoramidate bond, a phosphorothioate bond, a thioester bond, or a peptide bond (i.e., peptide nucleic acid). The term also includes, as equivalents, derivatives, variants and analogs of either RNA or DNA made from nucleotide analogs, single (sense or antisense) and double-stranded nucleic acids. Deoxyribonucleotides include deoxyadenosine, deoxycytidine, deoxyguanosine and deoxythymidine. For RNA, the uracil base is uridine.

[0574] As used herein, an “isolated nucleic acid molecule” is one which is separated from other nucleic acid molecules which are present in the natural source of the nucleic acid molecule. An “isolated” nucleic acid molecule, such as a cDNA molecule, can be substantially free of other cellular material, or culture medium, when produced by recombinant techniques, or substantially free of chemical precursors or other chemicals, when chemically synthesized. Exemplary isolated nucleic acid molecules provided herein include isolated nucleic acid molecules encoding an antibody or antigen-binding fragments provided.

[0575] As used herein, “operably linked,” with reference to nucleic acid sequences, regions, elements or domains, means that the nucleic acid regions are functionally related to each other. For example, nucleic acid encoding a leader peptide can be operably linked to nucleic acid encoding a polypeptide, whereby the nucleic acids can be transcribed and translated to express a functional fusion protein, wherein the leader peptide effects secretion of the fusion polypeptide. In some instances, the nucleic acid encoding a first polypeptide (e.g., a leader peptide) is operably linked to nucleic acid encoding a second polypeptide, and the nucleic acids are transcribed as a single mRNA transcript, but translation of the mRNA transcript can result in one of two polypeptides being expressed. For example, an amber stop codon can be located between the nucleic acid encoding the first polypeptide and the nucleic acid encoding the second polypeptide, such that, when introduced into a partial amber suppressor cell, the resulting single mRNA transcript can be translated to produce either a fusion protein containing the first and second polypeptides, or can be translated to produce only the first polypeptide. In another example, a promoter can be operably linked to nucleic acid encoding a polypeptide, whereby the promoter regulates or mediates the transcription of the nucleic acid.

[0576] As used herein, “synthetic,” with reference to, for example, a synthetic nucleic acid molecule or a synthetic gene or a synthetic peptide, refers to a nucleic acid molecule or gene or polypeptide molecule that is produced by recombinant methods and/or by chemical synthesis methods.

[0577] As used herein, the residues of naturally occurring α-amino acids are the residues of those 20 α-amino acids found in nature which are incorporated into a protein by the specific recognition of the charged tRNA molecule with its cognate mRNA codon in humans.

[0578] As used herein, “polypeptide” refers to two or more amino acids covalently joined. The terms “polypeptide” and “protein” are used interchangeably herein.

[0579] As used herein, a “peptide” refers to a polypeptide that is from 2 to about or 40 amino acids in length.

[0580] As used herein, an “amino acid” is an organic compound containing an amino group and a carboxylic acid group. A polypeptide contains two or more amino acids. For purposes herein, amino acids in the polypeptides, such as antibodies, provided include the twenty naturally-occurring amino acids (Table 4), non-natural amino acids, and amino acid analogs (e.g., amino acids wherein the α-carbon has a side chain). As used herein, the amino acids, which occur in the various amino acid sequences of polypeptides appearing herein, are identified according to their well-known, three-letter or one-letter abbreviations (see, Table 4). The nucleotides, which occur in the various nucleic acid molecules and fragments, are designated with the standard single-letter designations used routinely in the art.

[0581] As used herein, “amino acid residue” refers to an amino acid formed upon chemical digestion (hydrolysis) of a polypeptide at its peptide linkages. The amino acid residues described herein are generally in the “L” isomeric form. Residues in the “D” isomeric form can be substituted for any L-amino acid residue, as long as the desired functional property is retained by the polypeptide. NH₂ refers to the free amino group present at the amino terminus of a polypeptide. COOH refers to the free carboxy group present at the carboxyl terminus of a polypeptide. In keeping with standard polypeptide nomenclature described in J. Biol. Chem., 243:3557-59 (1968), and adopted at 37 C.F.R. §§ 1.821-1.822, abbreviations for amino acid residues are shown in Table 4:

TABLE 4
Table of Correspondence

| SYMBOL | | |
|---|---|---|
| 1-Letter | 3-Letter | AMINO ACID |
| Y | Tyr | Tyrosine |
| G | Gly | Glycine |
| F | Phe | Phenylalanine |
| M | Met | Methionine |
| A | Ala | Alanine |
| S | Ser | Serine |
| I | Ile | Isoleucine |
| L | Leu | Leucine |
| T | Thr | Threonine |
| V | Val | Valine |
| P | Pro | Proline |
| K | Lys | Lysine |
| H | His | Histidine |
| Q | Gln | Glutamine |
| E | Glu | Glutamic acid |
| Z | Glx | Glutamic Acid and/or Glutamine |
| W | Trp | Tryptophan |
| R | Arg | Arginine |
| D | Asp | Aspartic acid |
| N | Asn | Asparagine |
| B | Asx | Aspartic Acid and/or Asparagine |
| C | Cys | Cysteine |
| X | Xaa | Unknown or other |

[0582] All sequences of amino acid residues represented herein by a formula have a left to right orientation in the conventional direction of amino-terminus to carboxyl-terminus. In addition, the phrase “amino acid residue” is defined to include the amino acids listed in the Table of Correspondence (Table 4), modified, non-natural and unusual amino acids. Furthermore, a dash at the beginning or end of an amino acid residue sequence indicates a peptide bond to a further sequence of one or more amino acid residues, or to an amino-terminal group, such as NH₂, or to a carboxyl-terminal group, such as COOH. In a peptide or protein, suitable conservative substitutions of amino acids are known to those of skill in the art and generally can be made without altering a biological activity of a resulting molecule. Those of skill in the art recognize that, in general, single amino acid substitutions in non-essential regions of a polypeptide do not substantially alter biological activity (see, e.g., Watson et al., Molecular Biology of the Gene, 4th Edition, 1987, The Benjamin/Cummings Pub. Co., p. 224).

[0583] Such substitutions can be made in accordance with the exemplary substitutions set forth in Table 5 as follows:

TABLE 5
Exemplary Conservative Amino Acid Substitutions

| Original Residue | Conservative Substitution |
|---|---|
| Ala (A) | Gly; Ser |
| Arg (R) | Lys |
| Asn (N) | Gln; His |
| Cys (C) | Ser |
| Gln (Q) | Asn |
| Glu (E) | Asp |
| Gly (G) | Ala; Pro |
| His (H) | Asn; Gln |
| Ile (I) | Leu; Val |
| Leu (L) | Ile; Val |
| Lys (K) | Arg; Gln; Glu |
| Met (M) | Leu; Tyr; Ile |
| Phe (F) | Met; Leu; Tyr |
| Ser (S) | Thr |
| Thr (T) | Ser |
| Trp (W) | Tyr |
| Tyr (Y) | Trp; Phe |
| Val (V) | Ile; Leu |

[0584] Other substitutions also are permissible and can be determined empirically or in accord with other known conservative or non-conservative substitutions.

[0585] As used herein, “naturally occurring amino acids” refer to the 20 L-amino acids that occur in polypeptides.

[0586] As used herein, the term “non-natural amino acid” refers to an organic compound that has a structure similar to a natural amino acid but has been modified structurally to mimic the structure and reactivity of a natural amino acid. Non-naturally occurring amino acids thus include, for example, amino acids or analogs of amino acids other than the 20 naturally occurring amino acids and include, but are not limited to, the D-stereoisomers of amino acids. Exemplary non-natural amino acids are known to those of skill in the art, and include, but are not limited to, 2-Aminoadipic acid (Aad), 3-Aminoadipic acid (bAad), β-alanine/β-Amino-propionic acid (Bala), 2-Aminobutyric acid (Abu), 4-Aminobutyric acid/piperidinic acid (4Abu), 6-Aminocaproic acid (Acp), 2-Aminoheptanoic acid (Ahe), 2-Aminoisobutyric acid (Aib), 3-Aminoisobutyric acid (Baib), 2-Aminopimelic acid (Apm), 2,4-Diaminobutyric acid (Dbu), Desmosine (Des), 2,2′-Diaminopimelic acid (Dpm), 2,3-Diaminopropionic acid (Dpr), N-Ethylglycine (EtGly), N-Ethylasparagine (EtAsn), Hydroxylysine (Hyl), allo-Hydroxylysine (Ahyl), 3-Hydroxyproline (3Hyp), 4-Hydroxyproline (4Hyp), Isodesmosine (Ide), allo-Isoleucine (Aile), N-Methylglycine, sarcosine (MeGly), N-Methylisoleucine (MeIle), 6-N-Methyllysine (MeLys), N-Methylvaline (MeVal), Norvaline (Nva), Norleucine (Nle), and Ornithine (Orn).

[0587] As used herein, a “DNA construct” is a single- or double-stranded, linear or circular DNA molecule that contains segments of DNA combined and juxtaposed in a manner not found in nature. DNA constructs exist as a result of human manipulation, and include clones and other copies of manipulated molecules.

[0588] As used herein, a “DNA segment” is a portion of a larger DNA molecule having specified attributes. For example, a DNA segment encoding a specified polypeptide is a portion of a longer DNA molecule, such as a plasmid or plasmid fragment, which, when read from the 5′ to 3′ direction, encodes the sequence of amino acids of the specified polypeptide.

[0589] As used herein, the term “polynucleotide” means a single- or double-stranded polymer of deoxyribonucleotides or ribonucleotide bases read from the 5′ to the 3′ end. Polynucleotides include RNA and DNA, and can be isolated from natural sources, synthesized in vitro, or prepared from a combination of natural and synthetic molecules. The length of a polynucleotide molecule is given herein in terms of nucleotides (abbreviated “nt”) or base pairs (abbreviated “bp”). The term nucleotides is used for single- and double-stranded molecules where the context permits. When the term is applied to double-stranded molecules, it is used to denote overall length and is understood to be equivalent to the term base pairs. It will be recognized by those skilled in the art that the two strands of a double-stranded polynucleotide can differ slightly in length and that the ends thereof can be staggered; thus all nucleotides within a double-stranded polynucleotide molecule cannot be paired. Such unpaired ends will, in general, not exceed 20 nucleotides in length.

[0590] As used herein, production by recombinant means by using recombinant DNA methods refers to the use of the well-known methods of molecular biology for expressing proteins encoded by cloned DNA.

[0591] As used herein, “expression” refers to the process by which polypeptides are produced by transcription and translation of polynucleotides. The level of expression of a polypeptide can be assessed using any method known in art, including, for example, methods of determining the amount of the polypeptide produced from the host cell. Such methods can include, but are not limited to, quantitation of the polypeptide in the cell lysate by ELISA, Coomassie blue staining following gel electrophoresis, Lowry protein assay, and Bradford protein assay.

[0592] As used herein, a “host cell” is a cell that is used to receive, maintain, reproduce and/or amplify a vector. A host cell also can be used to express the polypeptide encoded by the vector. The nucleic acid in the vector is replicated when the host cell divides, thereby amplifying the nucleic acids.

[0593] As used herein, a “vector” is a replicable nucleic acid from which one or more heterologous proteins can be expressed when the vector is transformed into an appropriate host cell. Reference to a vector includes those vectors into which a nucleic acid encoding a polypeptide or fragment thereof can be introduced, typically by restriction digest and ligation. Reference to a vector also includes those vectors that contain nucleic acid encoding a polypeptide, such as a modified anti-TNFR1 antibody. The vector is used to introduce the nucleic acid encoding the polypeptide into the host cell for amplification of the nucleic acid, or for expression/display of the polypeptide encoded by the nucleic acid. The vectors typically remain episomal, but can be designed to effect integration of a gene or portion thereof into a chromosome of the genome. Also contemplated are vectors that are artificial chromosomes, such as yeast artificial chromosomes and mammalian artificial chromosomes. Selection and use of such vehicles are well-known to those of skill in the art. A vector also includes “virus vectors” or “viral vectors.” Viral vectors are engineered viruses that are operatively linked to exogenous genes to transfer (as vehicles or shuttles) the exogenous genes into cells.

[0594] As used herein, an “expression vector” includes vectors capable of expressing DNA that is operatively linked with regulatory sequences, such as promoter regions, that are capable of effecting expression of such DNA fragments. Such additional segments can include promoter and terminator sequences, and optionally can include one or more origins of replication, one or more selectable markers, an enhancer, a polyadenylation signal, and the like. Expression vectors are generally derived from plasmid or viral DNA, or can contain elements of both. Thus, an expression vector refers to a recombinant DNA or RNA construct, such as a plasmid, a phage, recombinant virus or other vector that, upon introduction into an appropriate host cell, results in expression of the cloned DNA. Appropriate expression vectors are well-known to those of skill in the art and include those that are replicable in eukaryotic cells and/or prokaryotic cells, and those that remain episomal, or those which integrate into the host cell genome.

[0595] As used herein, “primary sequence” refers to the sequence of amino acid residues in a polypeptide or the sequence of nucleotides in a nucleic acid molecule.

[0596] As used herein, “sequence identity” refers to the number of identical or similar amino acids or nucleotide bases in a comparison between a test and a reference polypeptide or polynucleotide. Sequence identity can be determined by sequence alignment of nucleic acid or protein sequences to identify regions of similarity or identity. For purposes herein, sequence identity is generally determined by alignment to identify identical residues. The alignment can be local or global. Matches, mismatches and gaps can be identified between compared sequences. Gaps are null amino acids or nucleotides inserted between the residues of aligned sequences so that identical or similar characters are aligned. Generally, there can be internal and terminal gaps. When using gap penalties, sequence identity can be determined with no penalty for end gaps (e.g., terminal gaps are not penalized). Alternatively, sequence identity can be determined without taking into account gaps, as the number of identical positions/length of the total aligned sequence×100.

[0597] As used herein, a “global alignment” is an alignment that aligns two sequences from beginning to end, aligning each letter in each sequence only once. An alignment is produced, regardless of whether or not there is similarity or identity between the sequences. For example, 50% sequence identity based on “global alignment” means that in an alignment of the full sequence of two compared sequences, each of 100 nucleotides in length, 50% of the residues are the same. It is understood that global alignment also can be used in determining sequence identity even when the length of the aligned sequences is not the same. The differences in the terminal ends of the sequences are taken into account in determining sequence identity, unless the “no penalty for end gaps” is selected. Generally, a global alignment is used on sequences that share significant similarity over most of their length. Exemplary algorithms for performing global alignment include the Needleman-Wunsch algorithm (Needleman et al. (1970) J. Mol. Biol. 48:443). Exemplary programs for performing global alignment are publicly available and include the Global Sequence Alignment Tool available at the National Center for Biotechnology Information (NCBI) website (ncbi.nlm.nih.gov/), and the program available at deepc2.psi.iastate.edu/aat/align/align.html.

[0598] As used herein, a “local alignment” is an alignment that aligns two sequences, but only aligns those portions of the sequences that share similarity or identity. Hence, a local alignment determines if sub-segments of one sequence are present in another sequence. If there is no similarity, no alignment will be returned. Local alignment algorithms include BLAST or Smith-Waterman algorithm (Adv. Appl. Math. 2:482 (1981)). For example, 50% sequence identity based on “local alignment” means that in an alignment of the full sequence of two compared sequences of any length, a region of similarity or identity of 100 nucleotides in length has 50% of the residues that are the same in the region of similarity or identity.

[0599] For purposes herein, sequence identity can be determined by standard alignment algorithm programs used with default gap penalties established by each supplier. Default parameters for the GAP program can include: (1) a unary comparison matrix (containing a value of 1 for identities and 0 for non-identities) and the weighted comparison matrix of Gribskov et al. Nucl. Acids Res. 14:6745 (1986), as described by Schwartz and Dayhoff, eds., Atlas of Protein Sequence and Structure, National Biomedical Research Foundation, pp. 353-358 (1979); (2) a penalty of 3.0 for each gap and an additional 0.10 penalty for each symbol in each gap; and (3) no penalty for end gaps. Whether any two nucleic acid molecules have nucleotide sequences, or any two polypeptides have amino acid sequences, that are at least 80%, 85%, 90%, 95%, 96%, 97%, 98% or 99% “identical,” or other similar variations reciting a percent identity, can be determined using known computer algorithms based on local or global alignment (see, e.g., wikipedia.org/wiki/Sequence_alignment_software, providing links to dozens of known and publicly available alignment databases and programs). Generally, for purposes herein sequence identity is determined using computer algorithms based on global alignment, such as the Needleman-Wunsch Global Sequence Alignment tool available from NCBI/BLAST (blast.ncbi.nlm.nih.gov/Blast.cgi?CMD=Web&Page_TYPE=BlastHome); LAlign (William Pearson implementing the Huang and Miller algorithm (Adv. Appl. Math. (1991) 12:337-357)); and the program from Xiaoqui Huang, available at deepc2.psi.iastate.edu/aat/align/align.html. Typically, the full-length sequence of each of the compared polypeptides or nucleotides is aligned across the full-length of each sequence in a global alignment. Local alignment also can be used when the sequences being compared are substantially the same length.

[0600] As used herein, the term “identity” represents a comparison or alignment between a test and a reference polypeptide or polynucleotide. In one non-limiting example, “at least 90% identical to” refers to percent identities from 90% to 100%, relative to the reference polypeptide or polynucleotide. Identity at a level of 90% or more is indicative of the fact that, assuming for exemplification purposes, when a test and reference polypeptide or polynucleotide with a length of 100 amino acids or nucleotides are compared, no more than 10% (i.e., 10 out of 100) of amino acids or nucleotides in the test polypeptide or polynucleotide differ from those of the reference polypeptide or polynucleotide. Similar comparisons can be made between a test and reference polynucleotide. Such differences can be represented as point mutations randomly distributed over the entire length of an amino acid sequence, or they can be clustered in one or more locations of varying length, up to the maximum allowable, e.g., 10/100 amino acid difference (approximately 90% identity). Differences also can be due to deletions or truncations of amino acid residues. Differences are defined as nucleic acid or amino acid substitutions, insertions or deletions. Depending on the length of the compared sequences, at the level of homologies or identities above about 85-90%, the result can be independent of the program and gap parameters set; such high levels of identity can be assessed readily, often without relying on software.

[0601] As used herein, a “disulfide bond” (also called an S—S bond or a disulfide bridge) is a single covalent bond derived from the coupling of thiol groups. Disulfide bonds in proteins are formed between the thiol groups of cysteine residues, and stabilize interactions between polypeptide domains, such as antibody domains.

[0602] As used herein, “coupled” or “conjugated” means attached via a covalent or noncovalent interaction.

[0603] As used herein, the phrase “conjugated to an antibody” or “linked to an antibody” or grammatical variations thereof, when referring to the attachment of a moiety to an antibody or antigen-binding fragment thereof, such as a diagnostic or therapeutic moiety, means that the moiety is attached to the antibody or antigen-binding fragment thereof by any known means for linking peptides, such as, for example, by production of fusion proteins by recombinant means, or post-translationally by chemical means. Conjugation can employ any of a variety of linking agents to effect conjugation, including, but not limited to, peptide or compound linkers, or chemical cross-linking agents.

[0604] As used herein, “antibody-dependent cell-mediated cytotoxicity,” “antibody-dependent cellular cytotoxicity” and “ADCC” refer, interchangeably, to cell-mediated reactions in which nonspecific cytotoxic cells that express Fc receptors (FcRs) (e.g., natural killer (NK) cells, neutrophils, and macrophages) recognize bound antibody on a target cell and subsequently cause lysis of the target cell. The primary cells for mediating ADCC, NK cells, express FcγRIII only, whereas monocytes express FcγRI, FcγRII and FcγRIII. FcR expression on hematopoietic cells is summarized in Table 3 on page 464 of Ravetch et al. (1991) Annu. Rev. Immunol, 9:457-492. To assess ADCC activity of a molecule of interest, an in vitro ADCC assay may be performed (see, e.g., U.S. Pat. Nos. 5,500,362 and 5,821,337). Exemplary effector cells for such assays include peripheral blood mononuclear cells (PBMCs) and natural killer (NK) cells. Alternatively, or additionally, ADCC activity of the molecule of interest may be assessed in vivo, e.g., in an animal model, such as that disclosed in Clynes et al. (1998) Proc. Natl. Acad. Sci. USA 95:652-656.

[0605] As used herein, complement-dependent cytotoxicity (CDC) is an effector function of IgG and IgM antibodies. When such antibodies are bound to a surface antigen on target cell, such as a bacterial cell or viral-infected cell, the classical complement pathway is triggered by bonding protein C1q to these antibodies, resulting in formation of a membrane attack complex (MAC) and subsequent cell lysis.

[0606] As used herein, antibody-dependent cellular phagocytosis (ADCP) is a cellular process by which effector cells with phagocytic potential, such as monocytes and macrophages, internalize target cells. Once phagocytosed, the target cell resides in a phagosome, which fuses with a lysosome for degradation of the target cell via an oxygen-dependent or independent mechanism.

[0607] As used herein “therapeutic activity” refers to the in vivo activity of a therapeutic polypeptide. Generally, the therapeutic activity is the activity that is associated with treatment of a disease or condition. Therapeutic activity of a modified polypeptide can be any level of percentage of the therapeutic activity of the unmodified polypeptide, including but not limited to, 1% of the activity, 2%, 3%, 4%, 5%, 10%, 20%, 30%, 40%, 50%, 60%, 70%, 80%, 90%, 91%, 92%, 93%, 94%, 95%, 96%, 97%, 98%, 99%, 100%, 200%, 300%, 400%, 500%, or more, of the therapeutic activity compared to the unmodified polypeptide.

[0608] As used herein, the term “assessing” is intended to include quantitative and qualitative determination in the sense of obtaining an absolute value for the activity of a protein, such as an antibody, or an antigen-binding fragment thereof, present in the sample, and also, of obtaining an index, ratio, percentage, visual, or other value indicative of the level of the activity. Assessment can be direct or indirect.

[0609] As used herein, a “disease or disorder” refers to a pathological condition in an organism, resulting from a cause or condition including, but not limited to, infections, acquired conditions, and genetic conditions, and characterized by identifiable symptoms.

[0610] As used herein, “treating” a subject with a disease or condition means that the subject's symptoms are partially or totally alleviated, or remain static following treatment. Hence, treatment encompasses prophylaxis, therapy and/or cure. Prophylaxis refers to prevention of a potential disease and/or a prevention of worsening of symptoms or progression of a disease. Treatment also encompasses any pharmaceutical use of any antibody or antigen-binding fragment thereof, or compositions, provided herein.

[0611] As used herein, treatment means amelioration of a symptom or manifestation of a disease, disorder, or condition.

[0612] As used herein, “prevention” or “prophylaxis,” refers to methods in which the risk of developing a disease or condition is reduced. To prevent a disease means to reduce the risk of developing the disease.

[0613] As used herein, a “pharmaceutically effective agent” includes any therapeutic agent or bioactive agent, including, but not limited to, for example, anesthetics, vasoconstrictors, dispersing agents, and conventional therapeutic drugs, including small molecule drugs and therapeutic proteins.

[0614] As used herein, a “therapeutic effect” means an effect resulting from treatment of a subject that alters, typically improves or ameliorates, the symptoms of a disease or condition, or that cures a disease or condition.

[0615] As used herein, a “therapeutically effective amount” or a “therapeutically effective dose” refers to the quantity of an agent, compound, material, or composition containing a compound that is at least sufficient to produce a therapeutic effect following administration to a subject. Hence, it is the quantity necessary for preventing, curing, ameliorating, arresting or partially arresting a symptom of a disease or disorder.

[0616] As used herein, “therapeutic efficacy” refers to the ability of an agent, compound, material, or composition containing a compound to produce a therapeutic effect in a subject to whom the agent, compound, material, or composition containing a compound has been administered.

[0617] As used herein, a “prophylactically effective amount” or a “prophylactically effective dose” refers to the quantity of an agent, compound, material, or composition containing a compound, that, when administered to a subject, will have the intended prophylactic effect, e.g., preventing or delaying the onset, or reoccurrence, of disease or symptoms, reducing the likelihood of the onset, or reoccurrence, of disease or symptoms, or reducing the incidence of viral infection. The full prophylactic effect does not necessarily occur by administration of one dose, and can occur only after administration of a series of doses. Thus, a prophylactically effective amount can be administered in one or more administrations.

[0618] As used herein, amelioration of the symptoms of a particular disease or disorder by a treatment, such as by administration of a pharmaceutical composition or other therapeutic, refers to any lessening, whether permanent or temporary, lasting or transient, of the symptoms, that can be attributed to or associated with administration of the composition or therapeutic.

[0619] As used herein, a “prodrug” is a precursor or derivative form of a pharmaceutically active substance that is less cytotoxic to tumor cells compared to the parent drug and is capable of being enzymatically activated or converted into the more active parent form (see, e.g., Wilman, 1986, Biochemical Society Transactions, 615th Meeting Belfast, 14:375-382; and Stella et al., “Prodrugs: A Chemical Approach to Targeted Drug Delivery,” Directed Drug Delivery, Borchardt et al., (ed.), pp. 247-267, Humana Press, 1985).

[0620] As used herein, an “anti-cancer agent” refers to any agent that is destructive or toxic to malignant cells and tissues. For example, anti-cancer agents include agents that kill cancer cells or otherwise inhibit or impair the growth of tumors or cancer cells. Exemplary anti-cancer agents are chemotherapeutic agents.

[0621] As used herein, an “anti-angiogenic agent” or “angiogenesis inhibitor” is a compound that blocks, or interferes with, the development of blood vessels.

[0622] As used herein, a TNF-related or TNF-mediated disease refers to a disease, condition, or disorder in which TNFR1 or TNFR1 signaling plays a role in the etiology; included are diseases, disorders, and conditions in which inhibition of TNFR1 signaling can be ameliorative of a symptom of the disease, condition, or disorder.

[0623] As used herein, a “TNFR2 agonist,” or an “anti-TNFR2 agonist,” refers to compounds, including small molecules and TNFR2 antibodies or antigen-binding fragments thereof, and other polypeptides that initiate, promote, or increase activation of TNFR2 and/or potentiate one or more signal transduction pathways mediated by TNFR2. For example, TNFR2 agonists can promote or increase the proliferation of a population of Treg cells. TNFR2 agonists can promote or increase TNFR2 activation by binding to TNFR2, e.g., to induce a conformational change that renders the receptor biologically active. For example, TNFR2 agonists can nucleate the trimerization of TNFR2 in a manner similar to or that mimics the interaction between TNFR2 and its cognate ligand, TNF (TNFα), thus inducing TNFR2-mediated signaling. TNFR2 agonists also can induce the proliferation of CD4⁺, CD25⁺, FOXP3⁺ Treg cells. TNFR2 agonists can also suppress the proliferation of cytotoxic T lymphocytes (e.g., CD8⁺ T-cells), e.g., through activation of immunomodulatory Treg cells or by directly binding to TNFR2 on the surface of an autoreactive cytotoxic T-cell and inducing apoptosis. A TNFR2 agonist antibody or fragment thereof, for use in the methods herein, can specifically bind to TNFR2, and generally is sufficiently specific so that it does not specifically binding to another receptor of the tumor necrosis factor receptor (TNFR) superfamily member, such as TNFR1.

[0624] As used herein, a TNFR2-selective agonist is a TNFR2 agonist that does not or substantially does not result in TNFR1 signaling activity.

[0625] As used herein, a Treg expander is a molecule, including small molecules and polypeptides, that increases regulatory T cells (Treg cells or Tregs), which are an immunosuppressive subpopulation of T cells with immunosuppressive properties via production of cytokines.

[0626] As used herein, the terms “pan-growth factor trap construct,” “pan-EGFR ligand trap construct,” “growth factor trap,” “multi-specific growth factor trap construct,” “bi-specific growth factor trap construct,” “EGFR ligand trap construct,” “pan-HER ligand trap construct,” “pan-HER therapeutic,” “EGFR ligand trap construct,” “HER ligand trap construct” and “growth factor trap construct” are used interchangeably to refer to pan-cell surface receptor molecules, including peptide-based compounds, that modulate the activity of two or more human epidermal growth factor receptors (EGFRs), also referred to as HER or ErbB receptors. Generally, a pan-growth factor trap targets at least two different HER receptors, such as via ligand binding and/or interaction with the receptors.

[0627] As used herein, an “extracellular domain” or “ECD” is the portion of a cell surface receptor that occurs on the surface of the receptor and includes the ligand-binding site(s). For purposes herein, reference to an “ECD polypeptide” includes any ECD-containing molecule, or portion thereof, as long as the ECD polypeptide does not contain any contiguous sequence associated with another domain (e.g., transmembrane domain, protein kinase domain, or others) of a cognate receptor.

[0628] As used herein, “knobs into holes” or “knobs-in-holes” (KIH), refers to multimerization domains, such as immunoglobulin Fc domains, engineered so that steric interactions between and/or among such domains, promote stable interaction, and promote the formation of heterodimers (or heteromultimers) compared to homodimers (or homomultimers) from a mixture of monomers. This can be achieved, for example, by constructing knobs or protuberances and holes or cavities in the complementary multimerizing domains. “Knobs” can be constructed by replacing small amino acid side chains from the interface of the first multimerizing domain polypeptide (e.g., first Fc monomer) with larger side chains (e.g., tyrosine or tryptophan). Compensatory “holes” of identical or similar size to the knobs optionally are created on the interface of the second complementary multimerizing polypeptide (e.g., second Fc monomer) by replacing large amino acid side chains with smaller ones (e.g., alanine or threonine).

[0629] As used herein, “tethering” refers to the interaction between two domains of a receptor monomer, whereby the monomer occurs in a conformation that renders it less available for interaction. For example, subdomain II in HER1, HER3 and HER4, can interact with subdomain IV, forming a tethered, inactive structure. When in a tethered state, a receptor or isoform thereof is less available, or is unavailable, for dimerization and/or ligand binding. The ECDs of the monomeric forms of HER1, HER3 and HER4 occur in a tethered form that exhibits lower ligand affinity than the untethered form. HER2, which lacks certain residues in subdomain IV, occurs in an untethered form and is available for dimerization with HER1, HER3 and HER4. Upon ligand binding to a tethered (monomeric) form, the tethering interaction is released, and the ECD (or receptor) is in a conformation available for dimerization, which involves interactions between domains II of two ECDs.

[0630] As used herein, HER (ErbB)-related diseases, HER-associated diseases, or HER-mediated disease, are any diseases, conditions or disorders in which an epidermal growth factor receptor (HER) and/or ligand is implicated in some aspect of the etiology, pathology development thereof, or symptom thereof. Involvement includes, for example, expression, overexpression, or activity of a HER family member or ligand. Diseases, include, but are not limited to, proliferative diseases, including cancers, such as, but not limited to, glioma, and pancreatic, gastric, head and neck, cervical, lung, colorectal, endometrial, prostate, esophageal, ovarian, uterine, bladder or breast cancers. Other conditions, include those involving cell proliferation and/or migration, including those involving pathological inflammatory and/or autoimmune responses, such as rheumatoid arthritis (RA), non-malignant hyperproliferative diseases, ocular conditions, skin conditions (e.g., psoriasis), conditions resulting from smooth muscle cell proliferation and/or migration, such as stenosis, including restenosis, atherosclerosis, muscle thickening of the bladder, heart or other muscles, or endometriosis.

[0631] As used herein, the term “subject” refers to an animal, including a mammal, such as a human being.

[0632] As used herein, a “patient” refers to a human subject.

[0633] As used herein, “animal” includes any animal, such as, but not limited to, primates including humans, gorillas and monkeys; rodents, such as mice and rats; fowl, such as chickens; ruminants, such as goats, cows, deer, and sheep; pigs; and other animals. Non-human animals exclude humans as the contemplated animal. The polypeptides provided herein are from any source, animal, plant, prokaryotic and fungal. Most polypeptides are of animal origin, including mammalian origin, and generally, for therapeutic use, are human or humanized.

[0634] As used herein, a “composition” refers to any mixture. It can be a solution, suspension, liquid, powder, paste, aqueous, non-aqueous, or any combination thereof.

[0635] As used herein, a “stabilizing agent” refers to compound added to the formulation to protect either the antibody or conjugate, such as under the conditions (e.g., temperature) at which the formulations herein are stored or used. Thus, included are agents that prevent proteins from degradation from other components in the compositions. Exemplary of such agents are amino acids, amino acid derivatives, amines, sugars, polyols, salts and buffers, surfactants, inhibitors, or substrates and other agents as described herein.

[0636] As used herein, a “combination” refers to any association between or among two or more items. The combination can be two or more separate items, such as two compositions or two collections, a mixture thereof, such as a single mixture of the two or more items, or any variation thereof. The elements of a combination are generally functionally associated or related, such as elements used in a method.

[0637] As used herein, “combination therapy” refers to the administration of two or more different therapeutics, such as an anti-TNFR construct or such as an antibody or antigen-binding fragment thereof, provided herein, and one or more therapeutics or other treatment(s), such as radiation and surgery. Multiple therapeutic agents can be provided and administered separately, sequentially, intermittently, simultaneously, or in a single composition.

[0638] As used herein, a “kit” is a packaged combination that optionally includes other elements, such as additional reagents and instructions for use of the combination or elements thereof, for a purpose including, but not limited to, activation, administration, diagnosis, and assessment of a biological activity or property.

[0639] As used herein, a “unit dose form” refers to physically discrete units suitable for human and animal subjects, and packaged individually, as is known in the art.

[0640] As used herein, a “single dosage formulation” refers to a formulation for direct administration.

[0641] As used herein, a “multi-dose formulation” refers to a formulation that contains multiple doses of a therapeutic agent and that can be directly administered to provide several single doses of the therapeutic agent. The doses can be administered over the course of minutes, hours, weeks, days or months. Multi-dose formulations can allow dose adjustment, dose-pooling, and/or dose-splitting. Because multi-dose formulations are used over time, they generally contain one or more preservatives to prevent microbial growth.

[0642] As used herein, an “article of manufacture” is a product that is made and sold. As used throughout this application, the term is intended to encompass any of the compositions provided herein contained in articles of or for packaging.

[0643] As used herein, a “fluid” refers to any composition that can flow. Fluids thus encompass compositions that are in the form of semi-solids, pastes, solutions, aqueous mixtures, gels, lotions, creams and other such compositions.

[0644] As used herein, an isolated or purified polypeptide or protein (e.g., an isolated antibody or antigen-binding fragment thereof), or biologically-active portion thereof (e.g., an isolated antigen-binding fragment), is substantially free of cellular material or other contaminating proteins from the cell or tissue from which the protein is derived, or substantially free from chemical precursors or other chemicals when chemically synthesized. Preparations can be determined to be substantially free if they appear free of readily detectable impurities as determined by standard methods of analysis, such as thin layer chromatography (TLC), gel electrophoresis, and high performance liquid chromatography (HPLC), used by those of skill in the art to assess such purity, or sufficiently pure such that further purification does not detectably alter the physical and chemical properties, such as enzymatic and biological activities, of the substance. Methods for purification of the compounds to produce substantially chemically pure compounds are known to those of skill in the art. A substantially chemically pure compound, however, can be a mixture of stereoisomers. In such instances, further purification might increase the specific activity of the compound.

[0645] As used herein, a “cellular extract” or “lysate” refers to a preparation or fraction which is made from a lysed or disrupted cell.

[0646] As used herein, a “control” refers to a sample that is substantially identical to the test sample, except that it is not treated with a test parameter, or, if it is a plasma sample, it can be from a normal volunteer not affected with the condition of interest. A control also can be an internal control.

[0647] As used herein, the singular forms “a,” “an” and “the” include plural referents unless the context clearly dictates otherwise. Thus, for example, reference to a polypeptide, containing “an immunoglobulin domain” includes polypeptides with one or a plurality of immunoglobulin domains.

[0648] As used herein, the term “or” is used to mean “and/or” unless explicitly indicated to refer to alternatives only, or the alternatives are mutually exclusive.

[0649] As used herein, ranges and amounts can be expressed as “about” a particular value or range. “About” also includes the exact amount. Hence “about 5 amino acids” means “about 5 amino acids” and also “5 amino acids.” For particular parameters about is a range within experimental error or a range acceptable to one of skill in the art for a particular parameter.

[0650] As used herein, “optional” or “optionally” means that the subsequently described event or circumstance does or does not occur, and that the description includes instances where said event or circumstance occurs and instances where it does not. For example, an optionally variant portion means that the portion is variant or non-variant.

[0651] As used herein, the abbreviations for any protective groups, amino acids and other compounds, are, unless indicated otherwise, in accord with their common usage, recognized abbreviations, or the IUPAC-IUB Commission on Biochemical Nomenclature (see, Biochem. (1972) 11(9):1726-1732).

[0652] For clarity of disclosure, and not by way of limitation, the detailed description is divided into the subsections that follow.

### B. OVERVIEW OF CONSTRUCTS AND METHODS

[0653] Autoimmune disease occurs when the body's immune system attacks itself. The resulting inflammation and tissue destruction is initiated by an inflammatory hormone called tumor necrosis factor (TNF). There are more than 100 types of autoimmune disease; overall, about 75% of those with an autoimmune disease are women. Prior drugs for autoimmune disease have adverse side effects, including infections, heart problems, and other diseases and disorders,

[0654] TNF interacts with immune cells via two receptors, TNFR1, which is overactive in autoimmune disease, and TNFR2 which suppresses autoimmune disease, but is muted when TNFR1 is overactive. TNF blockers, such as infliximab (sold as Remicade®), adalimumab (sold as Humira®), and etanercept (sold as Enbrel®) block TNFR1 and TNFR2, resulting in the adverse side effects. Constructs provided herein address this problem. Constructs provided herein shut down only TNFR1, which leads to increased TNFR2 activity, thereby not only treating autoimmune disease symptoms, but providing improved treatment and reduced or no adverse side effects because TNFR2 activity is not blocked. Provided herein a variety of constructs that address the problems with the prior art TNF blockers. Types of constructs identified by their activity, and detailed and provided herein, are summarized in the following table:

| | Disease to | |
|---|---|---|
| Type of Construct | be Treated | Action |
| TNFR1 Antagonists | Autoimmune | Specific blockade of TNFR1; |
| | disease and acute | spares TNFR2 |
| | inflammation | |
| Growth Factor traps | Rheumatoid | Traps 9 growth factors from |
| | arthritis and | the EGF family (EGFR and |
| | cancer | HER3; and dimerization |
| | | dependent HER2) |
| TNFR2 Antagonists | Cancer checkpoint | Inhibition of tumoral |
| | inhibitor | suppressor Treg function |
| | | thus increases active immunity |
| TNFR2 Agonists | Inflammation and | Induces proliferation of Treg |
| | fibrosis | to reduce inflammation |

[0655] Provided are constructs for treatment of TNF-mediated diseases, disorders, and conditions, or diseases, disorders, and conditions in which TNF plays a role in the etiology, or in which interference with TNFR1 signaling has an ameliorative effect. For example, the TNFR1 antagonists can be used for treatment of a variety of disorders, including autoimmune disorders, and also diseases and conditions, such as endometriosis, brain fog, such as from chemotherapy and COVID, Alzheimer's disease, acute inflammation, such as results from infection by influenza viruses, and SARS-COV2, which results in long-lasting or permanent damage to the lungs, kidneys, and other tissues. Because of the adverse effects and consequent safety concerns with prior TNF blockers, they cannot be used for most of these indications. The TNFR1 antagonist constructs provided herein can be used. These constructs as described herein are monovalent in that they only inhibit TNFR1 and do not cause receptor clustering, they are specific, non-immunogenic, and have a half-life of at least about 3-4 weeks, permitting approximately once-a-month dosing.

[0656] Hence, provided are TNFR1 antagonist constructs, TNFR2 agonist constructs, and multi-specific, such as bi-specific constructs that include TNFR1 antagonist and TNFR2 agonist activity. The constructs include at least one moiety that specifically interacts with TNFR1 or TNFR2, and, generally, a further moiety that modulates the interaction directly or indirectly or that provides a pharmacological (pharmacodynamic or pharmacokinetic or both) property to the construct. Hence a construct as provided herein includes at least two moieties: a binding moiety that interacts with TNFR1 or TNFR2, and a second moiety that modulates or alters pharmacological properties or activities of the construct or the binding moiety.

[0657] Among the constructs provided herein are those that are antagonists of TNFR1 activity. The TNFR1 antagonist constructs contain a portion that binds to or interacts with TNFR1 and inhibits TNFR1-mediated signaling, and a second portion that confers additional properties, such as extended serum half-life, elimination of ADCC and/or CDC activity, and modulation of interaction with particular receptors. The TNFR1 antagonists and constructs also include modification(s) so that they have none or reduced immunogenicity, particularly in a human, and also can include modifications to eliminate or reduce binding to pre-existing antibodies.

[0658] The TNFR1 antagonist constructs, are selected to specifically bind to TNFR1, and to have minimal or no binding to TNFR2 or no TNFR2 antagonist activity. Thus, the constructs only modulate TNFR1. In some embodiments, the TNFR1 antagonist constructs are selected to also have or to be linked to a second domain or moiety that has TNFR2 agonist activity. The TNFR1 constructs, include those that are designed or selected to interact with TNFR1 with affinity, such as K_{d}<50 nM or <10 nM or <5 nM, and particularly with higher affinity (as K_{d}<1 nM or <0.1 nM or higher affinity) and/or potent inhibition of TNFR1 signaling (e.g., IC₅₀ 50 nM or <10 nM or <5 nM or <3 nM or, 1 nM or <0.5 nM).

[0659] Also provided are multi-specific, such as bi-specific, constructs that contain a TNFR1 antagonist moiety, linked directly, or via a linker, to a TNFR2 agonist moiety. The linker provides advantageous properties to the molecules, such as, for example, increased serum half-life, increased stability, proper three-dimensional structure and flexibility, and improved pharmacological properties. These constructs solve problems associated with the administration of other therapies, such as anti-TNF therapies (“TNF Blockers,” (examples include Etanercept, adalimumab (Humira®), Infliximab)), because these constructs increase the specificity of TNFR1 inflammatory blockade and result in conservation or amplification of TNFR2 function, which is a natural immunosuppressor, at least in part by up-regulation of immunosuppressive Tregs, and the induction of protective and anti-inflammatory signaling pathways. In addition, TNF Blockade resulting in inhibition of TNFR2 function also reduces the T cell-induced monocyte activation leading to increased possibility of opportunistic infections (see e.g., Rossel et al. (2007) J. Immunol. 179:4239-48).

[0660] There are numerous differences between the activity of exemplary TNFR1 antagonist constructs provided herein and existing approved TNF Blockers: TNF Blockers, such as etanercept, adalimumab, infliximab, is that they are not specific for TNFR1. Other blockers, such as like IL6, IL17, IL23 only block their own part of the cytokine cascade, not the whole thing. Existing TNF blockers have the same mechanism of action for TNFR1 and TNFR2, thereby blocking the activity of both. JAK inhibitors pose similar problems; they have inflammatory and anti-inflammatory activities. For example, the inflammatory cytokine Il1 is not blocked by JAK inhibitors, the inflammatory cytokine IL6 is blocked by JAK inhibitors (a second line use for rheumatoid arthritis treatment), and IL10, which is anti-inflammatory, is not blocked by JAK inhibitors. Constructs provided herein, in contrast, combine the effectiveness of TNFR1 and TNF inhibitor therapies with the benefits of TNFR2 agonists that eliminate or reduce the adverse effects of anti-TNFR1/anti-TNF therapies, and also contribute additional therapeutic modalities advantages, including the up-regulation of immunosuppressive Tregs, and the induction of protective and anti-inflammatory signaling pathways.

[0661] The TNFR1 antagonist constructs contain one or more TNFR1 inhibitors, one or more linkers, and one or more activity modifiers. For example, the structure of the TNFR1 antagonist constructs provided herein can be represented by the formulae 1:

(TNFR1 inhibitor)ₙ-linkerₚ-(activity modifier)_{q}, Formula 1a, or

(activity modifier)_{q}-linkerₚ-(TNFR1 inhibitor)ₙ Formula 1b, where:

each of n and q is an integer, and each is independently 1, 2, or 3; p is 0, 1, 2 or 3; and an activity modifier is a moiety, such as a polypeptide, such as albumin, or an Fc that is modified to have reduced or no ADCC activity, that increases serum half-life of the TNFR1 inhibitor; and the TNFR1 inhibitor is a molecule, such as a polypeptide or small drug molecule that binds to TNFR1 and inhibits its activity, such as signaling activity. The activity modifier is not a human serum albumin antibody or an unmodified single Fc. Activity modifiers include modified Fc regions, such as Fc modified to eliminate ADCC and/or CDC activity, Fc dimers, and other antibody domains. The linkers include chemical linkers, and polypeptides, such as GS linkers, and hinge regions, such as from antibodies, so that the constructs include chemical conjugates, fusion proteins, and combinations of both.

[0662] Also provided are multi-specific constructs. The structure of the multi-specific, such as, bi-specific, constructs provided herein is represented by the following formula (Formula 2):

(TNFR1 inhibitor)ₙ-(activity modifier)ᵣ₁-(Linker (L))ₚ-(activity modifier)ᵣ₂-(TNFR2 agonist)_{q},

where n=1, 2, or 3, p=1, 2, or 3, q=0, 1 or 2, and each of r1 and r2 is independently 0, 1, or 2. As with the constructs of formulae 1 the order of components can be varied and there can be additional linkers as needed. The constructs can include additional linkers as required for conferring properties such as flexibility. Each linker can contain a plurality of components. Formula 2 also can include an activity modifier in place of or in addition to a linker. Activity modifiers and linkers include, an Fc or and Fc with a hinge region, or an Fc with a GS linker, or other combinations of components. The Fc in these constructs include unmodified Fc regions; the linkers are as described above, and detailed below.

[0663] Also provided are TNFR2 agonist constructs that have formulae 3:

(TNFR2 agonist)ₙ-linkerₚ-(activity modifier)_{q}, formula 3a, or

(activity modifier)_{q}-linkerₚ-(TNFR2 agonist)ₙ, formula 3b,

where n, p and q are as set forth for formula 1, and the linkers and activity modifier are as described in formula 1.

[0664] The components, which are discussed in detail in the following sections, of formulae 1-3 can be polypeptides or other molecules, such as small drugs that specifically bind to or interact with the targeted receptor. Each component of the constructs/molecules provided herein is described in turn in sections below.

[0665] The properties of each component of the constructs provided herein is discussed in detailed in sections below. The components of the constructs, thus, include, but are not limited to, the following components, which are discussed in detail in Sections that follow:

[0666] 1. TNFR1 Antagonists

[0667] 2. TNFR2 Agonists

[0668] 3. Linkers
[0669] a. Glycine-Serine Linkers
[0670] b. Hinge Regions
[0671] c. chemical linkers

[0672] 4. Activity modifiers
[0673] a. Modified Fcs
[0674] b. Polypeptides and other moieties that confer improved or altered pharmacological properties, such as increased serum half-life, resistance to degradation by endogenous proteases, and other such properties.
   Other constructs, detailed in Sections that follow, also are provided.

[0675] The constructs are used in methods of treatment of diseases, disorders, and conditions in which TNF in a pathologic modifier of the disease, condition, or disorder, such that inhibition TNFR1 signaling is reduced or inhibited, and/or in which inhibition of TNF or TNFR1 signaling can suppress or cause regression of the disease, disorder, or condition, and/or in which inhibition ameliorates a symptom of the disease, disorder, and/or condition. Such diseases, conditions, and disorders, which include inflammatory diseases, including autoimmune diseases, are discussed in the section that follows.

[0676] Also provided are pharmaceutical compositions for use in the methods and uses, and nucleic acids and vectors for producing constructs that include polypeptides and those that are fusion proteins. The following sections describe diseases, disorders, and conditions, TNFR1/TNFR2 activities and their roles in the diseases, disorders, and conditions, existing treatments for the diseases, disorders, and conditions, constructs and components thereof that are provided herein, methods of producing the constructs, pharmaceutical compositions containing the constructs and/or encoding nucleic acids, and methods of treatment.

### C. TUMOR NECROSIS FACTOR (TNF) AND CHRONIC INFLAMMATORY AND AUTOIMMUNE DISEASES AND DISORDERS

[0677] This section describes the role that tumor necrosis factor (TNF) and/or its receptors play in inflammatory and autoimmune diseases, particulars of exemplary diseases, and problems with existing therapies, and shows how the constructs provided herein address these problems.

[0678] 1. Tumor Necrosis Factor (TNF)

[0679] Tumor necrosis factor (TNF; see e.g., SEQ ID NO:1; also referred to as TNF alpha, TNF-α, or TNFα) is a pleiotropic, proinflammatory cytokine that is associated with inflammatory and immuno-regulatory activities, including the regulation of tumorigenesis/cancer, host defense against pathogenic infections, apoptosis, autoimmunity, and septic shock, and that plays an important role in the coordination of innate and adaptive immune responses, as well as organogenesis, particularly of the lymphoid organs. In humans, TNF is produced primarily by macrophages, and also can be produced by monocytes, dendritic cells (DCs), B cells, T cells, fibroblasts and other cell types. It is produced as a homotrimeric membrane-bound protein containing 233 amino acids (26 kDa) that can be cleaved by the protease TACE (TNF alpha converting enzyme; also known as ADA17) to release soluble TNF, which contains 157 amino acids (17 kDa); membrane-bound and soluble forms of TNF are biologically active. Transmembrane human TNF contains 233 amino acids, and contains a cytoplasmic domain, corresponding to residues 1-35, a transmembrane domain, corresponding to residues 36-56, and an extracellular domain, corresponding to residues 57-233, with reference to SEQ ID NO:1. The soluble form of TNF corresponds to amino acid residues 77-233, as set forth in SEQ ID NO:1 (see, SEQ ID NO:2 for the sequence of amino acid residues of soluble TNF).

[0680] Uncontrolled production of TNF is associated with several inflammatory and autoimmune diseases and conditions, including, for example, septic shock, rheumatoid arthritis, psoriasis, psoriatic arthritis, ankylosing spondylitis, juvenile idiopathic arthritis, and inflammatory bowel disease (IBD). The overexpression of TNF also has been associated with neurodegenerative diseases and conditions, such as, for example, Alzheimer's disease, Parkinson's disease, stroke and multiple sclerosis. Additionally, TNF promotes osteoclastogenesis, and overproduction of TNF is associated with bone loss. In rheumatoid arthritis (RA), TNF is over-expressed in synovial fluids and in the synovial membrane, while expression of TNF receptors (TNFRs) is up-regulated in the synovial membrane. For example, overexpression of human TNF in mice results in the development of spontaneous RA-like lesions in the joints with the formation of hyperplastic synovial membranes and the destruction of cartilage and bone (see, e.g., Blüml et al. (2010) Arthritis & Rheumatism 62(6):1608-1619; Keffer et al. (1991) EMBO J. 10(13):4025-4031; Esperito Santo et al. (2015) Biochem. Biophys. Res. Commun. 464:1145-1150; Blüml et al. (2012) International Immunology 24(5):275-281; Dong et al. (2016) Proc. Natl. Acad. Sci. USA 113(43):12304-12309).

[0681] As discussed further below, TNF signals through two high-affinity, specific receptors, TNFR1 and TNFR2; TNFR1 is associated with detrimental inflammatory processes, while TNFR2 is associated with beneficial immuno-regulatory processes. It has been shown that membrane-bound TNF primarily activates TNFR2, while soluble TNF primarily activates TNFR1 (Blüml et al. (2010) Arthritis & Rheumatism 62(6):1608-1619). Soluble TNF (solTNF; corresponding to residues 77-233 of SEQ ID NO:1; see, also, the sequence set forth in SEQ ID NO:2), which is involved in paracrine signaling (primarily via TNFR1), is associated with chronic inflammation, whereas transmembrane TNF (tmTNF), which acts via cell-to-cell contact to induce juxtacrine signaling (primarily via TNFR2), is associated with the resolution of inflammation and with the induction of immunity against pathogens, such as Listeria monocytogenes and Mycobacterium tuberculosis (Zalevsky et al. (2007) J. Immunol. 179:1872-1883). Thus, TNF signaling through TNFR1 and TNFR2, effects different outcomes, depending on the receptor type.

[0682] Due to the association between TNF overexpression and the development of inflammatory and autoimmune diseases and conditions, the blockade of TNF has been used in the treatment of various such diseases and conditions, including, but not limited to, rheumatoid arthritis (RA), psoriasis, psoriatic arthritis, ankylosing spondylitis, juvenile idiopathic arthritis (JIA), and inflammatory bowel disease (IBD; e.g., Crohn's disease, ulcerative colitis). The use of TNF blockers, which block TNF and prevent signaling via both TNFR1 and TNFR2, is associated with an increased risk of serious infections, such as tuberculosis and listeriosis, due to immunosuppression. TNF blockers not only block detrimental inflammatory signaling via TNFR1, but also block beneficial, immune-regulatory signaling via TNFR2. As a result, the use of TNF blockers, particularly in the case of chronic diseases/conditions that require long-term administration, such as arthritis or IBD, can be limited. Approximately one-third of RA patients are non-responsive, or therapeutic benefits are not sustained, with the use of anti-TNF therapies. Thus, there is a need for therapies with improved therapeutic efficacy and safety, particularly therapies that block the inflammatory effects of TNFR1 signaling, but maintain, or boost, the beneficial anti-inflammatory effects of TNFR2 signaling. Such therapies are provided herein.

[0683] 2. Tumor Necrosis Factor Receptors (TNFRs)

[0684] Homotrimers of TNF bind to and signal through two specific, high-affinity homotrimeric receptors, TNFR1 (TNF receptor type 1; also known to as TNFRI, p55, p60, CD120a, TNF receptor superfamily member 1A, and TNFRSF1A), and TNFR2 (TNF receptor type 2; also known as TNFRII, p75, p80, CD120b, TNF receptor superfamily member 1B, and TNFRSF1B). TNFR1 is expressed by all nucleated cells types; TNFR2 expression is restricted to immune cells (e.g., monocytes, macrophages, activated T cells, regulatory T cells (Tregs), B cells and natural killer (NK) cells), endothelial cells, particular central nervous system (CNS) cells, and particular cardiac cells. TNFR2 expression on Tregs is induced upon T-cell receptor activation.

[0685] In vivo, TNFR1 and TNFR2 exist as membrane-bound receptors, and as soluble, “decoy” (i.e., non-signaling) receptors, following shedding from cell surfaces. Soluble TNF preferentially/selectively binds to TNFR1; binding of the membrane-bound and soluble forms of TNF, however, activates TNFR1. The primary ligand for TNFR2 is membrane-bound TNF. Soluble TNF does not fully activate TNFR2, but the soluble form of TNFR2 (following TNFR2 shedding) has a high binding affinity for TNF, allowing it to scavenge and inhibit TNF from binding membrane-bound, signaling receptors, which contributes to the anti-inflammatory effects of TNFR2. Membrane-bound TNFR2 binds TNF with rapid on and off kinetics, allowing TNFR2 to concentrate TNF on cell surfaces and pass the ligand to TNFR1, which mediates TNFR1 signaling. Each of TNFR1 and TNFR2 contains extracellular, transmembrane and cytoplasmic domains. The extracellular domains of TNFR1 and TNFR2 contain four cysteine-rich domains (CRDs) that are required for ligand binding. The intracellular domains of TNFR1 and TNFR2 initiate different signaling cascades, and mediate different effector functions, in response to TNF ligand binding.

[0686] TNFR signaling abnormalities are associated with several autoimmune diseases, and the administration of TNF can be used as a treatment strategy for such diseases. For example, low dose TNF selectively destroys autoreactive T cells in blood samples from type I diabetes and scleroderma patients, and in an animal model of Sjogren's syndrome. The administration of TNF can result in systemic toxicity, for example, in cancer patients with high TNF levels. As described herein, the toxicity results from the ubiquitous cellular expression of TNFR1; as described herein, agonizing TNFR2 is a safer therapeutic option than administration of TNF, due to its more restricted cellular expression. Promotion of TNF signaling via TNFR2 can be effected by administering a TNFR1 antagonist (see, e.g., Faustman et al. (2013) Front. Immunol. 4:478).

[0687] a. TNFR1

[0688] Human TNFR1 (see, SEQ ID NO:3), is the major inflammatory receptor, and accounts for the majority of the proinflammatory, cytotoxic and apoptotic effects attributed to TNF. Human TNFR1 is a homotrimeric receptor, and its binding by TNF induces a pro-inflammatory response (see, e.g., Morton et al. (2019) Sci Signal. 12(592):eaaw2418, for a description of TNFR1 signaling). TNFR1 contains 455 amino acid residues; residues 1-29 correspond to the signal peptide, residues 30-211 correspond to the extracellular domain, residues 212-232 correspond to the transmembrane domain, and residues 233-455 correspond to the cytoplasmic domain. Within the extracellular domain, TNFR1 contains cysteine-rich domains (CRDs) 1-4, corresponding to amino acid residues 43-82, 83-125, 126-166 and 167-196 of SEQ ID NO:3, respectively. CRDs 2 and 3 contact bound TNF, and CRD1, particularly amino acid residues 30-82 with reference to SEQ ID NO:3, forms the pre-ligand binding assembly domain (PLAD), a hemophilic interaction motif that is necessary for ligand binding and receptor function. The cytoplasmic domain contains a death domain (corresponding to residues 356-441 of SEQ ID NO:3) that binds to the TNFR1-associated death domain (TRADD) and the Fas-associated death domain (FADD) following the binding of TNF to TNFR1, resulting in signaling pathways that activate caspases and induce apoptosis. The binding of TNF to TNFR1 also initiates proinflammatory cascades through MAPK (mitogen-activated protein kinase; e.g., p38, JNK, ERK) and NF-κB (nuclear factor kappa-light-chain-enhancer of activated B cells) signaling pathways. TNFR1 plays a role in lymphatic organogenesis and in the immune response to pathogens, and is the primary receptor associated with host antiviral defense mechanisms. It has been shown that mycobacterial containment depends on TNF-derived signals, and that patients treated with TNF-blockers can suffer from endogenous reactivation of latent tuberculosis.

[0689] TNFR1, which primarily is involved in pro-inflammatory signaling, is the driving force in the development of arthritis. For example, knockout of TNFR1 in mice, as well as silencing of TNFR1 expression by RNA interference, results in the attenuation of collagen-induced arthritis (CIA), an animal model of arthritis. TNFR1 deficient mice that overexpress TNF are protected from the development of arthritis, and the reintroduction of TNFR1 on mesenchymal cells results in the development of TNF-dependent arthritis. Additionally, TNFR1 enhances the generation of osteoclasts, resulting in local bone destruction, and it has been shown that the lack of TNFR1 on hematopoietic cells attenuates bone destruction in a model of erosive arthritis. TNFR1 also has been associated with cardiotoxic effects in TNF-induced models of heart failure and myocardial infarction, and has been shown to promote neurodegeneration in an animal model of retinal ischemia (see, e.g., Schmidt et al. (2013) Arthritis & Rheumatism 65(9):2262-2273; Goodall et al. (2015) PLoS ONE 10(9):e0137065; McCann et al. (2014) Arthritis & Rheumatology 66(10):2728-2738; Ruspi et al. (2014) Cellular Signaling 26:683-690; Faustman and Davis (2013) Front. Immunol. 4:478; Blüml et al. (2012) International Immunology 24(5):275-281; Dong et al. (2016) Proc. Natl. Acad. Sci. USA 113(43):12304-12309).

[0690] b. TNFR2

[0691] Human TNFR2 (see, SEQ ID NO:4) contains 461 amino acid residues; residues 1-22 correspond to the signal peptide, residues 23-257 correspond to the extracellular domain, residues 258-287 correspond to the transmembrane domain, and residues 288-461 correspond to the cytoplasmic domain. TNFR2, which, unlike TNFR1, lacks a death domain, has a TNF receptor-associated factor 2 (TRAF2) binding site. TNFR2 signaling via TRAF2 promotes cell survival and proliferation through NF-κB and activator protein 1 (AP1) activation, and has been associated with PI3K-PKB/Akt-mediated repair and migration. As discussed elsewhere herein, TNF signaling via TNFR2 also promotes the expansion and activation of regulatory T cells (Tregs), which play an important role in the suppression of inflammatory and autoimmune diseases and disorders. TNFR2 signaling has been implicated in repair and regeneration in models of wound healing and myocardial infarction, while knockout of TNFR2 in a mouse model of erosive arthritis results in joint inflammation and bone destruction.

[0692] TNFR2, which primarily is involved in anti-inflammatory signaling, has been associated with neuro-, cardio-, gut- and osteo-protective effects. TNFR2 exhibits anti-inflammatory and protective effects; these effects have been demonstrated, for example, in experimental autoimmune encephalomyelitis (EAE), experimental colitis, heart failure/heart disease, myocardial infarction, inflammatory arthritis, demyelinating and neurodegenerative disorders, and infectious disease. For example, activation of TNFR2 by TNF inhibits seizures, attenuates cognitive dysfunction following brain injury, promotes survival following myocardial infarction in mice, protects against myocardial ischemia/reperfusion injury, and reduces remodeling and hypertrophy following heart failure. TNFR2 agonism also is associated with pancreatic regeneration, remyelination, survival of neuron subtypes, and stem cell proliferation. TNFR2 agonism selectively destroys autoreactive T cells, but not healthy cells, in blood samples from patients with type I diabetes, multiple sclerosis, Graves' disease and Sjogren's syndrome. In animal models of type I diabetes, elimination of autoreactive T cells using low-dose TNF results in the regeneration of pancreatic tissue. TNF signaling through TNFR2 has been shown to induce regeneration of oligodendrocyte precursors in myelin, and thus, can be of use for the treatment of demyelinating disorders, such as multiple sclerosis (MS). TNFR2 also has been shown to promote neuroprotection in an animal model of retinal ischemia.

[0693] TNFR2 also regulates osteoclastogenesis. Osteoclasts are a type of bone cells that break down bone tissue; the regulation of osteoclastogenesis is important for maintaining bone mass, and protecting against joint inflammation and erosive destruction. Mice lacking TNFR2 display enhanced osteoclastogenesis, worsening TNF-driven arthritis, and local bone destruction. The lack of TNFR2 in an animal model of erosive arthritis results in disease progression, and TNFR2-deficient mice overexpressing TNF develop aggravated arthritis and joint destruction compared with control mice. Expression of TNFR2 on hematopoietic cells attenuates TNF-driven arthritis, while the loss of TNFR2 on hematopoietic cells increases the recruitment of inflammatory cells to the synovial membrane. In experimental colitis, the lack of TNFR2 expression on CD4⁺ T cells accelerates the onset of disease and increases the severity of inflammation, while in experimental autoimmune encephalitis (EAE), symptoms are exacerbated in TNFR2-deficient mice (see, e.g., Schmidt et al. (2013) Arthritis & Rheumatism 65(9):2262-2273; Goodall et al. (2015) PLoS ONE 10(9):e0137065; McCann et al. (2014) Arthritis & Rheumatology 66(10):2728-2738; Ruspi et al. (2014) Cellular Signaling 26:683-690; Faustman and Davis (2013) Front. Immunol. 4:478; Blüml et al. (2012) International Immunology 24(5):275-281; Dong et al. (2016) Proc. Natl. Acad. Sci. USA 113(43):12304-12309). Polymorphisms in the TNFR2 gene are correlated with a variety of autoimmune diseases, including, for example, RA, Crohn's disease, systemic lupus erythematosus, ankylosing spondylitis, inflammatory bowel disease, ulcerative colitis and scleroderma; the polymorphisms hinder the binding of TNF to TNFR2, which limits activation of NF-κB and hampers TNFR2 signaling pathways in Tregs (see, e.g., Yang et al. (2018) Front. Immunol. 9:784).

[0694] TNFR1 contains an intracellular death domain and can activate apoptotic and/or inflammatory pathways, while TNFR2 binds TRAFs and can activate the canonical and non-canonical NF-κB pathways to control cell survival and proliferation. In general, cells that express TNFR2 also express TNFR1, at varying ratios, depending on the cell type and function. Since TNFR1 signaling generally induces cell death, whereas TNFR2 signaling generally induces cell survival, the ratio of their co-expression on cells shifts the balance towards apoptosis or cell survival. As discussed above and elsewhere herein, it has been shown that TNFR1 is the primary TNF receptor involved in the pathogenesis of RA, while TNFR2 plays an immunoregulatory role. Both receptors, however, are involved in mediating the antiviral activity of TNF. Animal disease models, for example, show that TNFR1 is associated with inflammatory neurodegeneration, while TNFR2 is associated with neuroprotection.

[0695] The selective inhibition of TNFR1, or the selective activation of TNFR2, has been demonstrated in a mouse model of NMDA-induced acute neurodegeneration, by administration of either ATROSAB (Antagonistic TNF Receptor One-Specific Antibody), a TNFR1-selective antagonistic IgG1 antibody, or EHD2-scTNF_{R2}, an agonistic TNFR2-selective TNF mutein (i.e., mutated protein). EHD2-scTNF_{R2} contains a covalently stabilized human TNFR2-selective single-chain TNF trimer with the mutations D143N/A145R (residue numbering with respect to soluble TNF as set forth in SEQ ID NO:2, and corresponding to D219N and A221R, respectively, with respect to SEQ ID NO:1; these mutations abrogate affinity for TNFR1), fused to the dimerization domain EHD2, which is derived from the heavy chain C_{H}2 domain of IgE and creates a disulfide bonded dimer that contains hexameric TNF domains. Simultaneous injection of NMDA and ATROSAB, or NMDA and EHD2-scTNF_{R2}, into the nucleus basalis magnocellularis results in significant but incomplete neuroprotective effects compared with controls, in an in vivo mouse model. The incomplete nature of these responses was due to the agonistic activity of ATROSAB, a byproduct of the bivalent antibody inducing aberrant receptor clustering and activation (Richter et al. (2013) PLoS One 8(8):e72156). Similarly, the EHD2-scTNFR2 is immunogenic in humans because of its multiple fusion partners, and an immune response to the IgE fragments result in an autoimmune reaction in toxicology studies (see, e.g., Weeratna et al. (2016) Immun. Inflamm. Dis. 4(2):135-147). Therefore, improved TNFR1 antagonists and improved TNFR2 agonists are needed that overcome these limitations.

[0696] 3. Regulatory T Cells (Tregs) and their Role in the Autoimmune Microenvironment

[0697] Regulatory T cells (Treg cells or Tregs) are an immunosuppressive subpopulation of T cells with immunosuppressive properties via production of cytokines. These include transforming growth factor beta, interleukin 35, and interleukin 10. Induction of Treg function can inhibit several pathologies. Induction can enhance success of transplantation, suppress allergy, control responses, such as severe acute respiratory syndrome, to infectious disease and autoimmunity. Tregs suppress and/or downregulate the induction and proliferation of effector T cells (Teffs), modulate the immune system, maintain immune homeostasis and tolerance to self-antigens, and can prevent the development of autoimmune disease and tissue destruction. Tregs express, among other markers, CD4, CTLA-4, CD25 (also known as IL-2 receptor alpha chain or IL2RA), and FOXP3 (transcription factor forkhead box P3), and express TNFR2 at a tenfold higher density than they express TNFR1. TNFR2 is expressed by only a subpopulation of Tregs, which is the maximally suppressive subset; this subset contains TNFR2-expressing CD4⁺FoxP3⁺ Tregs. TNF, via TNFR2 signaling, promotes Treg cell proliferation, up-regulation of FoxP3 expression, and Treg cell suppressive activity/function. The autoimmune microenvironment contains more autoreactive CD8⁺ effector T cells than immunosuppressive CD4⁺ Tregs, resulting in tissue destruction. As a result, preservation of TNFR2 function, or enhanced TNFR2 function, which expands Tregs and eliminates autoreactive T cells, restores the immune balance (see, Sharma et al. (2018) Front Immunol. 9:883). For these reasons, and others described below, pharmacological retention of Treg function by selective inhibition of TNFR1, possibly together with TNFR2 stimulation (agonism), would improve outcomes in many acute and chronic inflammatory conditions (severe acute respiratory syndrome, autoimmune diseases).

[0698] In addition to up-regulating the expression of TNFR2 on Tregs, TNF also up-regulates the Treg surface expression of other co-stimulatory members of the TNF receptor superfamily (TNFRSF), such as 4-1BB and OX40, result in the optimal activation and proliferation of Tregs, and in the attenuation of excessive inflammatory responses. Neutralization of TNF (blocking TNFR2) blocks in vivo expansion of Tregs (e.g., Hamano et al. (2011) Eur. J. Immunol. 41:2010-2020).

[0699] In comparison to CD4⁺FoxP3⁻ conventional T cells, CD4⁺FoxP3⁺ Tregs constitutively express TNFR2, promoting Treg cell activation, expansion and survival. TNF signaling through TNFR2 (i.e., TNFR2 agonism) promotes the activation and expansion of Tregs, while TNFR2 antagonism results in Treg contraction. For example, TNFR2 agonism selectively kills autoreactive T cells and expands suppressive Tregs in humans with autoimmune disease, and in animal models of autoimmunity. TNFR2 signaling promotes Treg cell expansion and suppressive activity in experimental autoimmune encephalomyelitis (EAE; an animal model of inflammatory CNS demyelinating disease, e.g., multiple sclerosis), and in a murine model of diabetes, and induces human antigen-specific Treg cells by tolerogenic dendritic cells. TNFR2-deficient Tregs are reduced in their ability to prevent experimental colitis in vivo, and TNFR2 is required for sustained FoxP3 expression on Tregs, and as a result, for maintaining the phenotypic and functional stability of Tregs, indicating that TNFR2 is required for the in vivo immunosuppressive function of Tregs (see, e.g., McCann et al. (2014) Arthritis & Rheumatology 66(10):2728-2738; Faustman and Davis (2013) Front. Immunol. 4:478; Schmidt et al. (2013) Arthritis & Rheumatism 65(9):2262-2273; Vanamee et al. (2017) Trends in Molecular Medicine 23(11):P1037-P1046; Chen et al. (2013) J. Immunol. 190(3):1076-1084). In one study, in vitro produced antigen-specific Tregs were shown to suppress disease and reduce joint inflammation and bone destruction in a well-established antigen-induced arthritis (AIA) model, in which mice are immunized with methylated bovine serum albumin (mBSA) to induce T cell-mediated tissue damage (see, e.g., Wright et al. (2009) Proc. Natl. Acad. Sci. USA 106(45):19078-19083). Using Tregs in cellular therapy, while promising, due to manufacturing and other complications, a traditional biologic therapeutic that provides the advantages of Tregs without the complications is needed.

[0700] As described and provided herein, TNFR2, and its expression by Tregs, is required for the suppression of inflammatory and autoimmune diseases and conditions. For example, the Mycobacterium bovis bacillus Calmetter-Guerin (BCG) induces transient expansion of Tregs. In a clinical trial, BCG triggered Treg production in patients with type I diabetes, resulting in suppression of disease and temporary restoration of islet cell function, indicating a use of Tregs and/or modulators that enhance Treg function in the treatment of type I diabetes (see, e.g., Spence et al. (2016) Curr Diab Rep 16(11):110. doi: 10.1007/s11892-016-0807-6).

[0701] It is described and established herein that modulation of Treg function presents a therapeutic approach for the prevention or treatment of inflammatory and autoimmune diseases and conditions. Tregs, however, only constitute ˜1-5% of total CD4+ T cells in the blood. Their low numbers hinder their clinical use. Ex vivo generation of Tregs, and/or stimulation of their production in vivo, is factor that limits their therapeutic use. For example, in vivo stimulation with IL-2, anti-CD3, or anti-CD28 is too toxic, while ex vivo stimulation using these agents generates heterogeneous CD4⁺ populations that can release proinflammatory cytokines and have antagonistic properties. Alternative approaches have used TL1A-Ig, a naturally occurring TNF receptor superfamily agonist, or TNFR2 monoclonal antibody agonists, to expand Tregs in vivo and ex vivo, respectively. A TNFR2 agonist construct, and the multi-specific constructs, provided herein can preserve and/or expand the Treg population in vivo without interfering with the therapeutic activity of anti-TNFR1 activity. As described and provided herein, selective inhibition of inflammatory TNFR1 activity, while maintaining or increasing TNFR2-associated Treg suppressive activity, is beneficial in the treatment of inflammatory and autoimmune diseases and conditions. These diseases and conditions include, but are not limited to, RA, type I diabetes, heart failure and multiple sclerosis (see, e.g., Goodall et al. (2015) PLoS ONE 10(9):e0137065).

[0702] In a tumor microenvironment (TME), in contrast to an autoimmune microenvironment in which the expansion of TNFR2⁺ Tregs prevents tissue destruction, tumors are infiltrated by large numbers of immunosuppressive TNFR2⁺ Tregs, which prevent the proliferation of tumor-killing CD8⁺ cytotoxic T lymphocytes (CTLs), also known as effector T cells (Teffs), allowing for tumor growth. Antagonism of TNFR2 on lymphocytes in the TME restores the balance between the two types of T cells, by inhibiting or eliminating Tregs and allowing for the activation and expansion of effector T cells, a condition where tumor growth can be controlled or reversed. To be useful as a therapeutic, the TNFR2 inhibitor must not have the ability to aggregate immune cells via ADCC for two reasons: 1) aggregation transiently leads to ‘super-induction’ of TNFR2 mediated immunosuppression; and 2) eventually leads to systemic depletion of Tregs, which will be detrimental to the patient because it is essential to retain a basal level of Treg activity to maintain immune homeostasis. Tumor cells and myeloid-derived suppressor cells (MDSCs) also express TNFR2, and inhibition of TNFR2 in MDSCs control metastasis, as shown in a murine liver cancer model. Thus, blockade of TNFR2, such as through the use of non-aggregating antagonistic antibodies or other therapeutics, as provided herein, presents a useful treatment for certain types of cancers via the inhibition of immunosuppressive Tregs. TNFR2 antagonists, however, only should be administered to patients whose tumors show overexpression of TNFR2 compared to adjacent normal tissue as judged from immunohistochemistry. Thus, such treatment should be accompanied by diagnostics to confirm overexpression (see e.g., Zhang et al. (2019) Thorac Cancer 10(3):437-444. doi:10.1111/1759-7714.12948; Yang et al. (2017) Oncol Lett. 14(2):2393-2398. doi:10.3892/ol.2017.6410; and Yang et al. (2018) Oncol Lett. 16(3):2971-2978. doi:10.3892/ol.2018.8998, for exemplary assays).

[0703] 4. Autoimmune/Inflammatory Diseases Mediated by or Involving TNF

[0704] Elevated levels or uncontrolled expression of TNF and deregulation of TNF signaling can cause chronic inflammation, which can result in the development of autoimmune diseases and tissue damage. TNF-α is involved in numerous diseases, disorders, and conditions. Constructs provided herein can be used for treatment of such diseases, disorders, and conditions. The following discussion describes some exemplary diseases, disorders, and conditions in which blocking TNF can have a therapeutic effect. TNF blockers, such as etanercept, infliximab, adalimumab, certolizumab and Golimumab, have adverse side effects that can limit their use for treatment of such diseases, disorders, and conditions. The constructs provided herein, which avoid some or all of these adverse effects, can be used to treat these diseases, disorders, and conditions (see, e.g., Lis et al. (2014) Arch Med Sci. 10(6):1175-1185 for a review of the role of TNF in disease and the use of TNF blockers for treatment thereof).

[0705] Inflammatory diseases include an array of disorders and conditions that are characterized by inflammation, and include autoimmune diseases. The immune system protects the body by producing antibodies and/or activating lymphocytes in response to invading microorganisms, such as viruses and bacteria. In healthy individuals, the immune system does not trigger a response against the body's own (i.e., “self”) cells; autoimmune diseases occur when the immune system attacks healthy, non-invading, self, cells and tissues. Autoimmune/inflammatory diseases and disorders associated with elevated TNF levels include, for example, arthritis (e.g., rheumatoid arthritis, psoriatic arthritis, juvenile idiopathic arthritis, spondyloarthritis), inflammatory bowel disease (e.g., Crohn's disease and ulcerative colitis), uveitis, fibrotic diseases, endometriosis, lupus, ankylosing spondylitis, psoriasis, multiple sclerosis (MS), Parkinson's disease, and Alzheimer's disease, among others. Exemplary autoimmune and inflammatory diseases and disorders, that can be treated with the constructs provided herein, are discussed below.

[0706] a. Arthritis

[0707] Rheumatoid Arthritis and Other Types of Arthritis

[0708] Rheumatoid arthritis (RA) is a chronic autoimmune inflammatory disease. The inflammation associated with rheumatoid arthritis affects the linings of the joints (i.e., the synovial lining), and also the membranes lining the blood vessels, heart and also can become inflamed. RA is characterized by the infiltration of immune cells (e.g., activated B cells) into the synovial membrane and synovial cell proliferation, which results in the thickening of the synovial lining. The proliferative mass, known as the pannus, invades and destroys cartilage and bone, irreversibly destroying joint structure and function. This is mediated by the induction of proinflammatory cytokines, such as TNF, IL-1 and IL-6. Tumor necrosis factor α (TNFα) is a key modulator of the induction and perpetuation of the proinflammatory activities that are associated with RA. TNF is over-expressed in synovial fluids and in the synovial membrane, and expression of TNFRs is up-regulated in the synovial membrane (see, e.g., Blüml et al. (2012) International Immunology 24(5):275-281; Schmidt et al. (2013) Arthritis & Rheumatism 65(9):2262-2273; Keffer et al. (1991) EMBO J. 10(13):4025-4031). Other types of arthritis that can be treated with constructs herein, include, for example, psoriatic arthritis, juvenile idiopathic arthritis, and spondyloarthritis

[0709] b. Inflammatory Bowel Disease (IBD) and Uveitis

[0710] Inflammatory bowel disease (IBD) includes Crohn's disease and ulcerative colitis, which are inflammatory diseases of the intestine and colon. Mice overexpressing TNF develop intestinal inflammation that resembles Crohn's disease, while TNFR1 deficiency protects against Crohn's disease (see, e.g., Fischer et al. (2015) Antibodies 4:48-70).

[0711] Uveitis is a form of eye inflammation that affects the eye wall (uvea), the middle layer of the eye between the retina and the sclera (white of the eye), and can lead to vision loss. TNF-alpha is involved in its pathophysiology, and TNF blockers have been used for treatment.

[0712] c. Fibrotic Diseases

[0713] Constructs herein can be used for treatment of fibrotic diseases. Dupuytren's disease is exemplary of such diseases. Dupuytren's disease (DD) is a common fibrotic condition of the hands that is characterized by irreversible flexion contractures of the fingers; the condition is limited to the palm of the hand and causes irreversible curling in of the fingers, severely compromising hand function. There are no approved therapies for early stage disease, which manifests as nodules that are quiescent for some time and that then become active and progress to cords and flexion deformities of the fingers, resulting in the loss of hand function. Treatment involves surgical excision (fasciotomy) of the diseased tissue or cords, or disruption of the cords using collagenase or needle fasciotomy. The surgical and non-surgical treatments have high rates of recurrence and complications. Therapeutic intervention at the early stages of disease, to prevent progression to cord development and the subsequent flexion contractures of the digits, is advantageous (see, e.g., Nanchahal et al. (2018) EBioMedicine 33:282-288).

[0714] Myofibroblasts, which express the contractile protein α-smooth muscle actin (α-SMA) and aggregate in nodules, deposit excessive collagenous extracellular matrix and are responsible for its remodeling and contraction in all fibrotic conditions, including DD. TNF converts palmar fibroblasts into myofibroblasts in patients with DD, via the Wnt signaling pathway, and DD myofibroblasts exhibit a dose-dependent reduction in contractility and reduction in the expression of α-SMA and pro-collagen, following treatment with anti-TNF therapies. Treatment with the fully humanized IgG mAbs adalimumab and golimumab have been the most effective. The use of anti-TNF therapies, such as adalimumab, however, is associated with an increased risk of infection, and in a phase 2a trial evaluating the therapeutic efficacy of adalimumab in DD, 1 patient (out of 21 receiving adalimumab) developed a wound infection requiring hospitalization (see, e.g., Nanchahal et al. (2018) EBioMedicine 33:282-288). Thus, other therapies are needed.

[0715] d. Tumor Necrosis Factor Receptor-Associated Periodic Syndrome (TRAPS)

[0716] Tumor necrosis factor receptor-associated periodic syndrome (TRAPS) is the second most common inherited autosomal dominant auto-inflammatory disease, and is caused by mutations in the TNFRSF1A gene, encoding TNFR1. TRAPS is characterized by unprovoked, periodic long-lasting fever, systemic inflammation, abdominal pain, skin lesions, conjunctivitis, myalgia and pericarditis, with inflammatory attacks lasting up to several weeks. A complication associated with more severe clinical phenotypes of TRAPS is AA-type serum amyloidosis, which can result in renal impairment and failure. Disease onset typically occurs in early childhood, but TRAPS can present in adults as well. The majority of TRAPS-associated mutations occur in the extracellular domain of TNFR1, which is involved in ligand binding. High-penetrance mutations, which are associated with the most severe clinical phenotype, occur in the extracellular cysteine-rich domains (CRDs). The mutations affect the folding and secondary structure of TNFR1, which can result in defective TNFR1 trafficking, altered ligand binding affinity, reduced activation-induced shedding and impaired cell signaling. For example, ligand-independent gain-of-function of TNFR1 induces TRAPS pathophysiology, and certain mutations result in the constitutive activity of TNFR1, NF-κB and caspase 1. Traditional anti-TNF therapies, including etanercept, infliximab, and others, are only partially effective in the treatment of TRAPS (see, e.g., Greco et al. (2015) Arthritis Research & Therapy 17:93), and thus, other therapies are needed.

[0717] e. Other Diseases Mediated by or Involving TNF

[0718] i. Neurodegenerative Diseases

[0719] Aging and several neurodegenerative diseases are associated with elevated levels of TNF in the central nervous system (CNS). TNF is implicated in initiating and maintaining neuroinflammation, and in modulating other neurological processes, such as synaptic function and plasticity. The levels of TNFR1 in the hippocampus of aged rats is approximately 3-fold higher compared to the levels of TNFR2. In animal models of disease, TNF is implicated in chronic glial activation and impaired neuronal viability through its actions on TNFR1. In aged animals, neurologic changes include synaptic dysfunction and Ca²⁺ dysregulation, which can be replicated in healthy young animals and in neuronal cultures using artificial elevations in TNF. TNF also potentiates the activity of L-type voltage sensitive Ca²⁺ channels (L-VSCCs); a similar effect is observed in hippocampal neurons of memory impaired aged rats. Studies in rats have shown that TNF blockade in the cerebellum accelerates learning in a delayed eyeblink task. Selective blockade of TNFR1 signaling, using XPro1595, a soluble dominant negative TNF (DN-TNF) that preferentially inhibits TNFR1 signaling, resulted in improved behavioral performance on a Morris swim task, reduced microglial activation, prevention of hippocampal long-term depression (LTD), and reduced the activity of L-VSCCs in CA1 neurons. These results indicate that TNF signaling via TNFR1 is implicated in modifying the neurologic phenotype of aged animals, and can result in pathological changes associated with neurological diseases (see, e.g., Sama et al. (2012) PLoS ONE 7(5):e38170).

[0720] a) Alzheimer's Disease

[0721] TNF is a central player in inflammatory responses; TNF protein levels are low in healthy brain but chronically elevated in many neuroinflammatory diseases, including Alzheimer's disease (AD). In animal models of AD, TNF promotes microglial activation, synaptic dysfunction, neuronal cell death, accumulation of plaques and tangles, and cognitive decline. For example, in a triple transgenic AD mouse model (3×Tg-Ad), with mutations in presenilin 1, amyloid precursor protein (APP) and tau, TNF levels were elevated in entorhinal cortex, coincident with the earliest appearance of pathology (see, e.g., McCoy et al. (2006) J. Neurosci. 26(37):9365-9375). TNF-driven processes are implicated in AD pathology and contribute to cognitive dysfunction and accelerated progression of AD. The bacterial endotoxin lipopolysaccharide (LPS), which induces inflammation and the production of TNF, accelerates the appearance and severity of AD pathology in several animal models of AD. The overproduction of proinflammatory mediators, including TNF, occurs in the brain when microglia, which are often in close physical association with amyloid plaques in AD brains, become chronically activated. Elevated levels of TNF inhibit phagocytosis of amyloid beta (Aβ) in the brains of AD patients, which hinders efficient plaque removal by microglia. The chronic inhibition of solTNF by administering a DN-TNF, such as XENP345, or a lentivirus encoding the DN-TNF, prevented the acceleration of AD-like pathology induced by chronic systemic inflammation in an animal model of AD (3×TgAD mice), and decreased the LPS-induced intraneuronal accumulation of 6E10-immunoreactive protein, particularly C-terminal amyloid precursor protein (APP) fragments (β-CTF), in the hippocampus, cortex and amygdala. Genetic deletion of TNFR1 in 3×TgAD mice also prevents the LPS-induced accumulation of β-CTF, which is neurotoxic. Neuronal cells bearing familial AD (FAD) mutations accumulate β-CTF intracellularly, implicating its involvement in the pathogenesis of AD. These results indicate that soluble TNF is a mediator of the effects of neuroinflammation on early, pre-plaque pathology in 3×TgAD mice, and that targeted inhibition of solTNF in the central nervous system (CNS) can slow the appearance of amyloid-associated pathology, cognitive deficits, and the progressive loss of neurons in AD (see, e.g., McAlpine et al. (2009) Neurobiol. Dis. 34(1):163-177).

[0722] b) Parkinson's Disease

[0723] Parkinson's disease (PD) is the second most prevalent neurodegenerative disease in the United States, with an incidence of 5% in individuals over 65 years of age. The clinical manifestations of Parkinson's disease result from the selective loss of dopaminergic neurons in the ventral mesencephalon substantia nigra pars compacta (SNpc), which results in a decrease in striatal dopamine. The cerebrospinal fluid (CSF) and postmortem brains of patients with PD and animal models of PD show elevated levels of TNF. A cohort of early-onset PD patients in Japan showed an increased frequency of a polymorphic allele (−1031 C) in the TNF gene promoter that results in higher transcriptional activity and elevated TNF levels. TNFR1 is highly expressed in nigrostriatal dopaminergic neurons, which increases vulnerability to TNF-induced neuroinflammation and dopaminergic neuron toxicity. The in vivo neutralization of soluble TNF (solTNF) by a dominant-negative TNF mutein (XENP345) was neuroprotective, and reduced the retrograde nigral degeneration induced by a striatal injection of the oxidative neurotoxin 6-hydroxydopamine (6-OHDA) by 50% and attenuated amphetamine-induced rotational behavior in rats, indicating preservation of striatal dopamine levels. Delayed administration of XENP345 in embryonic rat midbrain neuron/glia cell cultures exposed to lipopolysaccharide (LPS) prevented the degeneration of dopaminergic neurons, despite sustained microglia activation and secretion of solTNF. XENP345 also attenuated 6-OHDA-induced dopaminergic neuron toxicity in vitro. TNF, thus, is implicated in the development of Parkinson's disease, and it may be possible to delay the progressive degeneration of the nigrostriatal pathway in humans by using TNF-blocking therapeutics, particularly in the early stages of Parkinson's disease (see, e.g., McCoy et al. (2006) J. Neurosci. 26(37):9365-9375).

[0724] c) Multiple Sclerosis (MS)

[0725] CNS-specific overexpression of TNF in transgenic mice results in spontaneous demyelination, which is indicative of a role of TNF in multiple sclerosis (MS). A polymorphism in the gene encoding TNFR1 is linked to an increased susceptibility of developing MS. TNFR1 is necessary for the disease induction of experimental autoimmune encephalomyelitis (EAE), an animal model of MS, and TNFR2 deficiency worsens the disease. Mice expressing non-cleavable membrane-bound TNF are protected against EAE, indicating that the interaction of soluble TNF with TNFR1 is associated with disease pathology (see, e.g., Fischer et al. (2015) Antibodies 4:48-70).

[0726] ii. Endometriosis

[0727] TNF-α has been implicated in the pathophysiology of endometriosis. TNF-α levels are increased in peritoneal fluid of women with endometriosis, and the levels correlate with severity of disease (see, e.g., Koninckx (2008) Hum Reprod. 23: 2017-2023). Peritoneal fluid TNF-α is produced locally by activated peritoneal macrophages, and TNF-α induces IL-8 secretion by peritoneal mesothelial cells. The peritoneal fluid concentrations of TNF-α and IL-8 correlate with the size and the number of active peritoneal lesions (Bullimore, (2003) Med Hypotheses. 60:84-88). Serum TNF-α levels are increased, and monocytes from patients with endometriosis release more TNF-α in vitro compared with monocytes from controls. Peritoneal fluid levels of MCP-1 are increased in patients with endometriosis. TNF-α, IL-8 and MCP-1 drive an inflammatory Th-1 type response in the peritoneal fluid of patients with endometriosis. TNF-α mediated inflammation may be a causal factor in the pain associated with endometriosis. Blocking TNF-α appears to inhibit the development of the disease in animal models, and may be effective for humans. Because of the adverse side effects of existing TNF blockers, treatment of endometriosis with such blockers has not been recommended (see, Koninckx (2008) Hum Reprod. 23: 2017-2023). Constructs provided herein, however, are designed to avoid the deleterious effects, and can be considered for treating TNF-α mediated inflammation in endometriosis.

[0728] iii. Cardiovascular Disease

[0729] TNFα was the first cytokine to be identified in human atherosclerotic plaque; TNFα is involved in the activation of the endothelium and upregulation of adhesion molecules, which occur early in the development of atherosclerotic disease. TNF also is implicated in the pathogenesis of atherosclerosis by affecting lipid metabolism and inducing vascular inflammation. The blockade of TNFα by TNF binding protein, or IL-1 by an IL-1 receptor antagonist, partially protects apoE knockout mice from atherosclerosis. Atherogenesis primarily is the result of the production of TNFα by myeloid cells. The plaque area in apoE^{-/-} and TNF^{-/-} mice on a high fat diet is half the size of the plaque area in mice that are apoE^{-/-}. Transplantation of bone marrow from apoE^{-/-} and TNF^{-/-} mice, into apoE^{-/-} mice, reduced atherosclerotic lesion size by 83%. Atherosclerotic lesion size also was reduced following treatment of apoE^{-/-} mice with a recombinant soluble p55 (TNFR1) TNF blocker, indicating the role that TNF plays in atherosclerosis. NF-κB signaling is involved in the production of TNF-α in human atherosclerotic plaques. The peripheral blood levels of TNFα in patients with cardiovascular disease also is correlated with the development of myocardial infarction. Cardiotoxicity primarily is attributed to TNF-induced cardiomyocyte apoptosis. The use of anti-TNF therapies, such as infliximab and etanercept, in clinical trials for the treatment of heart failure failed, and resulted in increased mortality; anti-TNF therapies have thus not been tested for the treatment of cardiovascular disease (see, e.g., Udalova et al. (2016) Microbial Spectrum 4(4):MCHD-0022-2015; Kalliolias and Ivashkiv (2016) Nat. Rev. Rheumatol. 12(1):49-62). As a result, alternative therapies are required.

[0730] iv. Acute Respiratory Distress Syndrome (ARDS)

[0731] Acute respiratory distress syndrome (ARDS) affects approximately 190,000 patients per year in the U.S. and has mortality rates of up to 40%. There are no effective therapeutics targeting the underlying pathophysiological mechanisms of ARDS. ARDS is characterized by immune cell-mediated lung injury, which is associated with the release of inflammatory cytokines and proteases. The uncontrolled local inflammatory response in ARDS results in damage to the alveolar-capillary barrier, and non-cardiogenic pulmonary edema. Pulmonary neutrophil recruitment, which is central to the pathogenesis of ARDS, is mediated by the interaction of primed and activated neutrophils with the lung microvascular endothelium, and is increased by damage to the alveolar-capillary barrier caused by the action of proinflammatory mediators. TNF-α has been identified as a key effector molecule in ARDS, as well as in sepsis, which is a common cause of ARDS. For example, TNF-α contributes to increased endothelial permeability. Clinical trials involving the administration of non-selective anti-TNF antibodies for the treatment of sepsis have failed to demonstrate any survival benefit, and one trial indicated that higher doses were harmful.

[0732] TNFR1-deficient mice are protected from lung injury, sepsis and other acute organ injuries, while TNFR2-deficient mice are more susceptible to injury in these models, indicating that selective antagonism of TNFR1 can be therapeutically effective. GSK1995057, a short-acting, fully human domain antibody (dAb) fragment that selectively antagonizes TNFR1, but not TNFR2, attenuated disease severity in a murine model of acute respiratory distress syndrome, and attenuated inflammation and signs of lung injury in non-human primates. In a randomized, placebo-controlled trial of nebulized GSK1995057 in 37 healthy humans challenged with a low dose of inhaled endotoxin, treatment with GSK1995057 attenuated pulmonary neutrophilia, inflammatory cytokine release, and signs of endothelial injury in bronchoalveolar lavage and serum samples. These results indicate the potential for pulmonary delivery of selective TNFR1 antagonists for the prevention and treatment of ARDS (see, e.g., Proudfoot et al. (2018) Thorax 73:723-730).

[0733] v. Severe Acute Respiratory Syndrome (SARS) and COVID-19

[0734] Subjects infected with severe acute respiratory syndrome coronavirus (SARS-CoV) present with fever and respiratory illness, general malaise and lower respiratory tract symptoms, including cough and shortness of breath, with an overall fatality rate of ˜10%. TNF signaling promotes pathogenesis of SARS, by inducing excessive inflammation, which causes significant tissue damage. The development of a cytokine release syndrome (CRS) plays a role in severe COVID-19, the disease caused by severe acute respiratory syndrome coronavirus 2 (SARS-CoV-2). The persistent viral stimulation results, in some subjects in an increase in the levels of circulating cytokines, such as IL-6 and TNFα, which leads to reduced lymphocyte counts and triggers inflammatory organ damage, particularly to the lungs, and blood vessels. SARS-CoV-2 shares several similarities with SARS-CoV, the strain of coronavirus responsible for the SARS pandemic of 2002. SARS-CoV and SARS-CoV-2 use the spike (S)-proteins to engage their cellular receptor, ACE2 (angiotensin-converting enzyme 2), for invading cells. The expression of the ACE2 receptor is upregulated by SARS-CoV-2 infection and by inflammatory cytokine stimulation. In SARS-CoV infection, S-proteins induce the TNF-α-converting enzyme (TACE)-dependent shedding of the ACE2 ectodomain, which is a process that is strictly coupled to TNFα production. The loss of ACE2 activity due to shedding is associated with lung injury due to an increased activity of the renin-angiotensin system. ACE2 knockout mice are susceptible to severe respiratory failure following chemical challenge, and ACE2 has been shown to moderate ACE-induced intracellular inflammation. ACE2 downregulation is linked to the severe respiratory distress associated with SARS-CoV infection. Increased TNFα production can thus facilitate viral infection and result in organ damage, such as lung injury.

[0735] As discussed, regulatory T cells (Tregs) are a type of immunosuppressive cell that display diverse clinical applications in transplantation, allergy, infectious disease, GVHD, autoimmunity, and cancer. Tregs co-express CD4+ and the interleukin-2 receptor alpha chain CD25^{hi} and feature inducible levels of intracellular transcription factor forkhead box P3 (FOXP3). Naturally-occurring Tregs express TNFR2 at a higher density than TNFR1. TNF signaling through TNFR2 promotes Treg activity: TNF-mediated TNFR2 activates and induces proliferation of Tregs (100) and TNFR2 expression indicates maximally suppressive Tregs Thus, in the case when TNF is being overproduced in response to an infection (influenzas, SARS type viruses, endotoxemia) Treg's can prevent overreaction to inflammatory stimuli.

[0736] Anti-TNF can be a treatment for SARS and COVID-19. Adalimumab is being used for treatment of COVID-19 (clinical trial China in February, 2020 (ChiCTR2000030089); see, e.g., Lucchino et al. (2020) Rheumatology (Oxford) 59(6):1200-1203; Haga et al. (2008) Proc. Natl. Acad. Sci. U.S.A. 105:7809-7814). Knockout of TNFR2 in mice infected with SARS-CoV does not provide any protective effects; the double knockout of TNFR1 and TNFR2 protected infected mice from weight loss associated with infection (see, e.g., McDermott et al. (2016) BMC Systems Biology 10:93). These results indicate that TNF signaling through TNFR1 primarily contributes to the pathogenesis of SARS-CoV infection, by increasing proinflammatory processes, and that selective inhibition of TNFR1, rather than inhibition of TNF, is a better therapeutic approach. The constructs provided herein can be used to treat the acute inflammatory aspects of SARS and COVID-19. The constructs are used in combination with anti-infective agents; the constructs are used to suppress or ameliorate the acute effects of cytokine storm.

[0737] TNFα inhibition reduces the severity of virally-induced lung diseases, such as those caused by respiratory syncytial virus (RSV) or influenza virus, in mice. The depletion of TNF using anti-TNF antibody in these mouse models reduced the pulmonary recruitment of inflammatory cells, reduced the production of proinflammatory cytokines (e.g., IFNγ, IL-4, IL-5, TNF) by T-cells, and reduced the severity of illness without interfering with viral clearance (see, e.g., Hussell et al. (2001) Eur. J. Immunol. 31:2566-2573). These results indicate that TNF inhibitors and TNF receptor antagonists can be beneficial in the treatment of human viral lung diseases, such as those caused by SARS-CoV and SARS-CoV2, by preventing or reducing TNF-induced immune activation and pulmonary injury.

[0738] Allogeneic hematopoietic stem cell transplantation is complicated by the development of non-infectious idiopathic pneumonia syndrome (IPS), an acute pulmonary dysfunction that resembles SARS pneumonia. Elevated levels of TNFα have been found in the sera of patients who developed lung injury after allogeneic stem cell transplantation (SCT), and it has been shown that donor-derived alloreactive T-cells are associated with this process. In humans, anti-TNF therapy with etanercept is beneficial in the treatment of IPS after allogeneic stem cell transplantation. Recipients of allogeneic stem cell transplants are at high risk of developing bacterial and fungal infections, due to the immunoablative effects of SCT conditioning regimens, the requirement for long term use of immunosuppressive drugs to prevent or treat graft-vs-host disease (GvHD), and other SCT complications (including acute GvHD) that can impair host defenses (see, e.g., Yanik et al. (2002) Biol. Blood Marrow Transplant. 8:395-400). Other indications that can be treated by constructs provided herein include chemo brain, a condition experienced during and following chemotherapy, particularly women treated for breast cancer. Also, the treatments and constructs herein can be used to treat long COVID.

[0739] As a result, the use of selective TNFR1 antagonists, which preserves protective TNF signaling via TNFR2, and, unlike anti-TNF therapies, does not increase the risk of serious infections, provides a safer and more effective therapeutic option for the treatment, prevention or amelioration of virally- and non-virally-induced lung injury. The constructs provided herein, thus, are ideal therapeutics for these indications.

### D. THERAPIES FOR RHEUMATOID ARTHRITIS AND OTHER CHRONIC INFLAMMATORY AND AUTOIMMUNE DISEASES AND DISORDERS

[0740] There is no cure for rheumatoid arthritis (RA), but treatments can improve symptoms and slow disease progression, for example, by minimizing pain and swelling, preventing bone deformity, and maintaining day-to-day functioning. The primary treatments for RA are disease-modifying anti-rheumatic drugs (DMARDs), which also are used for the treatment of other chronic inflammatory and autoimmune diseases and disorders, such as, for example, psoriasis, plaque psoriasis, psoriatic arthritis, juvenile idiopathic arthritis, ankylosing spondylitis, Behçet's disease, inflammatory bowel disease (IBD; e.g., Crohn's disease and ulcerative colitis), multiple sclerosis, and lupus, as well as for the treatment of some cancers.

[0741] DMARDs are immunosuppressive and immunomodulatory agents that are classified as either conventional synthetic DMARDs (csDMARDs), or biological DMARDs (bDMARDs; e.g., antibodies and fusion proteins). Conventional synthetic DMARDs include, for example, methotrexate (MTX), a chemotherapy agent and immunosuppressant; hydroxychloroquine (HCQ; Plaquenil®), an anti-malarial agent; sulfasalazine (Azulfidine®), an anti-inflammatory drug; and leflunomide (Arava®), an immunosuppressant that inhibits dihydroorotate dehydrogenase. Biologic DMARDs include, for example, abatacept (Orencia®), a fusion protein that prevents T cell activation and contains the Fc region of IgG1 fused to the extracellular domain of CTLA-4; anakinra (sold, for example, under the trademark Kineret®), a recombinant human IL-1 receptor antagonist; rituximab (sold under trademarks, including Rituxan®, Truxima®, MabThera®), a chimeric monoclonal antibody against CD20, which induces apoptosis in CD20⁺ cells, such as B cells; tocilizumab (atlizumab, Actemra®, RoActemra®), a humanized monoclonal antibody against the IL-6 receptor (IL-6R); corticosteroids; tofacitinib (Xeljanz®), a small molecule inhibitor of Janus kinase (JAK), a protein tyrosine kinase involved in mediating cytokine signaling; and TNF-inhibitors/anti-TNF agents, such as, for example, certolizumab pegol (Cimzia®), infliximab (Remicade®), adalimumab (Humira®), golimumab (Simponi®), and etanercept (Enbrel®). Combination therapy, particularly of methotrexate with a biological DMARD, is more effective than either therapy alone. Combination therapies also can include multiple csDMARDs and multiple csDMARDs with one biological DMARD. Due to the risk of serious side effects, including serious infections, multiple biological DMARDs, particularly anti-TNF DMARDs, typically are not used for combination therapy methods.

[0742] The following sections describe existing therapies, and the problems associated with each, to highlight how the therapies provided herein solve the problems.

[0743] 1. Conventional Synthetic Disease Modifying Anti-Rheumatic Drugs (csDMARDs)

[0744] Conventional synthetic Disease Modifying Anti-Rheumatic Drugs (csDMARDs) are typically the first line treatment for RA and other autoimmune and chronic inflammatory diseases and disorders. csDMARDS include drugs such as methotrexate, leflunomide, hydroxychloroquine, and sulfasalazine, Methotrexate is the most commonly used agent for initial treatment, and its mechanism of action involves stimulating the release of adenosine from fibroblasts, reducing neutrophil adhesion, inhibiting leukotriene B4 synthesis by neutrophils, inhibiting local IL-1 production, reducing levels of IL-6 and IL-8, suppressing cell-mediated immunity, and inhibiting synovial collagenase gene expression. Other conventional synthetic DMARDs act by inhibiting the proliferation of lymphocytes or causing lymphocyte dysfunction. For example, leflunomide inhibits dihydroorotate dehydrogenase, resulting in inhibition of pyrimidine synthesis, and blocking lymphocyte proliferation. Sulfasalazine mediates its anti-inflammatory effects by preventing oxidative, nitrative and nitrosative damage, and hydroxychloroquine is a mild immunomodulatory agent that inhibits intracellular toll-like receptor 9 (TLR9).

[0745] Hydroxychloroquine, which has the best safety profile of conventional DMARDs, does not increase the risk of infections, and does not cause hepatotoxicity or renal dysfunction; common side effects of hydroxychloroquine include rash and diarrhea. Retinopathy/maculopathy is a rare but serious side effect of hydroxychloroquine therapy which is associated with doses of more than 5 mg/kg/day, long-term use (more than 5 years of therapy), older age and chronic kidney disease. Other rare adverse effects of hydroxychloroquine include anemia, leukopenia, myopathy, and cardiomyopathy. Therapy with methotrexate, leflunomide, and sulfasalazine is associated with nausea, abdominal pain, diarrhea, rash/allergic reaction, bone marrow suppression, hepatotoxicity and higher incidence of common and sometimes serious infections. Methotrexate and leflunomide also cause alopecia. Other side effects associated with methotrexate therapy include interstitial lung disease, folic acid deficiency, and liver cirrhosis. Leflunomide also is associated with hypertension, peripheral neuropathy, and weight loss. Sulfasalazine has a very high risk of gastrointestinal distress and can rarely cause DRESS syndrome (drug reaction with eosinophilia and systemic symptoms) (see, e.g., Benjamin et al. Disease Modifying Anti-Rheumatic Drugs (DMARD) [Updated 2020 Feb. 27]. In: StatPearls [Internet]. Treasure Island (FL): StatPearls Publishing; 2020 January Available from: URL:ncbi.nlm.nih.gov/books/NBK507863/). These drugs are effective because they are immunosuppressive. The constructs provided herein that are selective anti-TNFR1 antagonists that preserve TNFR2 immunosuppressive activity advantageously can avoid the need for these immunosuppressive drugs.

[0746] 2. Anti-TNF Therapies/TNF Blockers

[0747] Anti-TNF therapies/TNF-blockers (a type of biological DMARD) typically are prescribed after the failure of conventional DMARDs, and include monoclonal antibodies (mAbs), such as the chimeric mAb infliximab (Remicade®); containing a murine variable region and a human IgG1 constant region, and the fully humanized mAbs (IgG1s) adalimumab (Humira®) and golimumab (Simponi®); the PEGylated humanized Fab′ fragment of a mAb targeting TNF, certolizumab pegol (Cimzia®); and TNFR2 fusion proteins, such as the TNFR2-Fc fusion protein etanercept (Enbrel®), which contains the extracellular receptor region that contains the binding site of human TNFR2 fused to the Fc of human IgG1. Remsima® and Inflectra® are biosimilars of infliximab that are approved for use in the European Union for the treatment of various autoimmune and chronic inflammatory diseases and disorders. These TNF inhibitors, which sequester TNF, are used for the treatment of various diseases and conditions, including, for example, RA, psoriasis, psoriatic arthritis, ankylosing spondylitis, juvenile idiopathic arthritis (JIA) and/or inflammatory bowel disease (IBD; e.g., Crohn's disease and ulcerative colitis).

[0748] Because of the immunosuppressive effects of therapies that target TNF, such therapies are associated with severe side effects, including, for example, an increased risk of sepsis and serious infections, such as listeriosis, reactivation of tuberculosis, reactivation of hepatitis B/C, reactivation of herpes zoster, and invasive fungal and other opportunistic infections. TNF is a key cytokine in the inflammatory and immune responses to infections, and the use of drugs that remove TNF impairs host immunity against microorganisms, increasing the risk of infection. For example, TNF blocking agents are associated with the reactivation of M. tuberculosis infection. TNF plays an important role in the resistance against Mycobacterium tuberculosis, and adalimumab therapy in RA patients significantly reduces reactivity against M. tuberculosis. As described herein, the reduced immune reactivity can be related to the activation of Tregs and the induction of apoptosis in effector lymphocytes. Anti-TNF therapy has been shown to induce macrophage apoptosis in the rheumatoid synovium. Infliximab is associated with increased apoptosis in the inflammatory cell infiltrate in the guts of patients with Crohn's disease. Other anti-rheumatic drugs, such as methotrexate and glucocorticoids, also can induce apoptosis in immune cells (see, e.g., Vigna-Pérez et al. (2005) Clin. Exp. Immunol. 141(2):372-380). Adalimumab and infliximab, but not etanercept, a TNFR2-Fc fusion protein, induce caspase-dependent apoptosis in cultured monocytes, and downregulate the production of IL-10 and IL-12 by monocytes (see, e.g., Shen et al. (2005) Ailment Pharmacol. Ther. 21:251-258). The most prevalent fungal infections associated with TNF blockers are histoplasmosis, candidiasis, and aspergillosis. Anti-TNF agents also can cause worsening of severe congestive heart failure, drug-induced lupus, and demyelinating central nervous system (CNS) diseases, as well as lymphomas and non-melanoma skin cancers (see, e.g., Benjamin et al. Disease Modifying Anti-Rheumatic Drugs (DMARD) [Updated 2020 Feb. 27]. In: StatPearls [Internet]. Treasure Island (FL): StatPearls Publishing; 2020 January Available from: ncbi.nlm.nih.gov/books/NBK507863/).

[0749] Infliximab also has been associated with the development of leukopenia, neutropenia, thrombocytopenia, and pancytopenia (some fatal). Etanercept has been associated with an increased incidence of opportunistic bacterial and viral infections in patients with RA. Etanercept also is used to treat severe refractory graft-versus-host disease (GvHD). Subjects with severe GvHD who are treated with etanercept have a very high risk (100% in one study, see, Zoran et al. (2019) Sci. Rep. 9:17231) of developing invasive aspergillosis (IA), a life-threatening mold (i.e., fungal) infection caused by Aspergillus fumigatus. Treatment with etanercept results in the downregulation of genes involved in immune responses and TNF signaling, including genes involved in NF-κB signaling, anti-microbial humoral responses and apoptotic processes, as well as a decrease in the secretion of chemokines, such as CXCL10, from immune cells (see, e.g., Zoran et al. (2019) Sci. Rep. 9:17231).

[0750] Other side effects associated with the use of TNF blocking therapies include congestive heart failure, liver injury, demyelinating disease/CNS disorders, lupus, psoriasis, sarcoidosis, and an increased susceptibility to the development of additional autoimmune diseases, as well as cancers, including lymphomas and solid malignancies (see, e.g., Dong et al. (2016) Proc. Natl. Acad. Sci. USA 113(43):12304-12309; Zalevsky et al. (2007) J. Immunol. 179:1872-1883; Zoran et al. (2019) Sci. Rep. 9:17231). Thus, the abrogation of all TNF-mediated signaling, by sequestering TNF, is not an ideal therapeutic strategy, as it results in severe immunosuppression that can lead to serious, sometimes fatal, infections, and other dangerous side effects.

[0751] Anti-TNF therapies ameliorate RA but are not curative, and require years of continuous and costly therapy. The inhibition/blockade of TNF in RA reduces inflammation and joint destruction, but, as discussed above, is associated with an increased risk of serious infections, such as tuberculosis and listeriosis, due to immunosuppression. As a result, the use of TNF blockers, particularly in the case of chronic diseases/conditions that require long-term administration, such as arthritis and IBD, is limited. Approximately 30% of RA patients are non-responsive, or therapeutic benefits are not sustained, with the use of anti-TNF therapies (see, e.g., McCann et al. (2014) Arthritis & Rheumatology 66(10):2728-2738). Non-responsiveness also occurs in non-RA patients receiving anti-TNF therapeutics. Depending on the anti-TNF agent, 13-33% of treated patients do not respond to treatment, and up to 46% stop responding, resulting in discontinuation or dose increase (see, e.g., Richter et al. (2019) MABS 11(4):653-665). Thus, there is a need for therapies with improved therapeutic efficacy and safety.

[0752] Anti-TNF therapeutics block/sequester TNF and inhibit soluble TNF (solTNF) and transmembrane TNF (tmTNF) signaling via TNFR1 and TNFR2, respectively; solTNF signaling has been associated with chronic inflammation, while tmTNF signaling has been associated with the resolution of inflammation and with the induction of immunity against pathogens such as Listeria monocytogenes and Mycobacterium tuberculosis. The primary anti-inflammatory effects of anti-TNF therapies are achieved by blocking TNFR1, while blocking TNFR2 inhibits Treg cell activity. As discussed elsewhere herein, TNFR1 signaling is primarily inflammatory and is involved in the pathogenesis of inflammatory and autoimmune diseases and conditions, such as RA, psoriasis, IBD, and neurodegenerative disorders, such as MS; whereas, TNFR2 signaling has anti-inflammatory and protective effects in various cell and organ types, including neural, cardiac, gut and bone tissues, and also is involved in host defense mechanisms against infection by pathogens. Thus, as described herein, selective blockade of TNFR1 improves the therapeutic efficacy in comparison to anti-TNF therapies, by eliminating undesirable, proinflammatory signaling associated with RA and other autoimmune and inflammatory diseases and conditions, while preserving the beneficial effects of TNFR2 signaling (see, e.g., McCann et al. (2014) Arthritis & Rheumatology 66(10):2728-2738; Schmidt et al. (2013) Arthritis & Rheumatism 65(9):2262-2273; Blüml et al. (2012) International Immunology 24(5):275-281; Zalevsky et al. (2007) J. Immunol. 179:1872-1883).

[0753] Anti-TNF therapies have failed in the treatment of neurodegenerative diseases, such as Alzheimer's disease, Parkinson's disease, stroke and multiple sclerosis (MS), which have been associated with the overexpression of TNF. For example, in a phase II trial for the treatment of relapsing remitting MS, a TNFR1 receptor-Fc IgG1 fusion protein anti-TNF therapeutic, lenercept (Ro 45-2081), failed, and symptoms were increased/worsened compared to patients receiving a placebo, with neurologic deficits being more severe in lenercept-treated patients. These results indicate that anti-TNF therapies can aggravate demyelinating diseases. While TNFR1 has been shown to mediate inflammatory neurodegeneration, TNFR2 induces neuroprotection, thus, blockade of signaling through both receptors by anti-TNF therapies abrogates the neuroprotective effects of TNFR2 signaling. The blockade of TNFR1 with ATROSAB, a humanized monoclonal antibody that blocks TNFR1, or the activation of TNFR2 with EHD2-scTNF_{R2}, an agonistic TNFR2-selective TNF mutein, results in the protection of cholinergic neurons against cell death, and reverts the neurodegeneration-associated memory impairment in a mouse model of NMDA-induced acute neurodegeneration. This is likely to be immunogenic. ATROSAB is a partial TNFR1 agonist; those of skill in the art would not administer a TNFR1 agonist. The blockade of TNFR1 and TNFR2, however, abrogates the therapeutic effect, indicating that TNFR2 plays an essential role in neuroprotection, and that selective blockade of TNFR1 can be used for the treatment of neurodegenerative diseases where anti-TNF therapies have failed (see, e.g., Dong et al. (2016) Proc. Natl. Acad. Sci. USA 113(43):12304-12309).

[0754] Due to the adverse effects associated with the use of anti-TNF agents, the non-responsiveness of some patients, the lack of a sustained response in patients that had an initial response, and the failure to treat and/or exacerbation of neurodegenerative diseases, such as MS, other therapies are needed. Such therapies are provided herein.

### E. THERAPEUTICS FOR TARGETING TNFR1/TNFR2

[0755] The following section discusses exemplary therapeutics that target TNFR1/TNFR2, and describes some problems and limitations with these therapeutics. Existing therapeutics can be modified as described in Section F and the Examples, or are used, in whole or in part, or are modified to improve their properties for use, in the constructs that are provided herein.

[0756] 1. TNFR1-Selective Antagonists

[0757] As discussed and provided herein, therapy with TNF blockers, such as etanercept, infliximab, adalimumab, and others abrogates TNF signaling via TNFR1 and TNFR2. While TNFR1 signaling results in inflammation, cytotoxicity and apoptosis, TNFR2 signaling is protective and anti-inflammatory, partly due to its expansion and activation of immunosuppressive Tregs, which destroy effector T cells in the autoimmune environment, preventing tissue destruction and disease progression. Therapy with TNF blockers, through its inhibition of TNFR2 signaling, and the consequential depletion of immunosuppressive Tregs, which results in a pro-inflammatory microenvironment, can fail in the treatment of, and/or can exacerbate, autoimmune and inflammatory diseases and disorders. The dual blockade of TNFR1 and TNFR2 also can lead to opportunistic infections and cancer.

[0758] As provided herein, the specific inhibition of TNFR1 signaling maintains normal TNFR2 function, which is necessary for maintaining the equilibrium between pro-inflammatory and anti-inflammatory activity, via the production of subsets of both regulatory and cytotoxic T cells. Selective TNFR1 inhibition retains the potent anti-inflammatory activity of TNFR2 signaling, results in fewer opportunistic infections and cancer, and preserves TNF-induced Treg functions.

[0759] a. TNFR1 Antagonistic Antibodies

[0760] Among TNFR1 antagonist antibodies, is ATROSAB (Antagonistic TNF Receptor One-Specific Antibody). ATROSAB, the first TNFR1 blocking antibody, is a full-length IgG1 that is a humanized version of the neutralizing mouse anti-human TNFR1 monoclonal antibody H398. It was abandoned as a therapeutic because it has partial agonist activity, which activates TNFR1, thereby mimicking TNF activity, a toxic pathway. ATROSAB maintains the conformation of TNFR1 in an inactive state and obstructs the binding of TNF. The Fc region in ATROSAB is mutated to eliminate FCγR receptor binding and complement fixation, thereby avoiding unwanted immune system activation (see, e.g., Kalliolias and Ivashkiv (2016) Nat. Rev. Rheumatol. 12(1):49-62).

[0761] Full-length antibodies have the advantage of increased in vivo half-life, but, as discussed elsewhere herein, are not feasible for the development of TNFR1 antagonists due to receptor cross-linking, which tends to agonize TNFR1 instead of antagonizing it. This did not result from Fc cross-linking because the Fc-interacting part of the antibody was removed by mutation. For example, the IgG ATROSAB exhibited some TNFR1 agonistic activity in the absence of TNF, which was observed to a limited extent at a narrow concentration range, due to its bivalent molecular structure. The cross-linking of TNFR1 also can occur due to secondary events, such as interactions with FcγRs or anti-drug antibodies (ADAs), which must be avoided to maintain the antagonistic nature of TNFR1 inhibitors. ADAs have been observed in patients treated with infliximab or adalimumab at rates of 50% and 31%, respectively (see, e.g., Richter et al. (2019) mAbs 11(4):653-665; Richter et al., (2019) mAbs 11(1):166-177).

[0762] b. Monovalent TNFR1 Antagonistic Antibodies/Antibody Fragments

[0763] Small antibody fragments, such as domain antibodies and derivatives and modified forms thereof have been developed, and exemplary antibody fragments and modified forms are discussed in the following sections. The small antibody fragments, however, have not been successfully developed into pharmaceuticals. They are limited in their use as therapeutics; they have short serum half-lives and fast peripheral clearance, which are a result of their small size. For example, molecules that are 50-60 kDa in size or smaller are subject to renal filtration; dAbs and other antibody fragments, which are less than 50-60 kDa in size, are rapidly cleared by the kidneys. For example, the dAb, designated DMS5541, and similar molecules demonstrate selectivity for TNFR1, and potentially can inhibit the deleterious effects of TNFR1 signaling. DMS5541, which is formed from two dAbs (antiTNFR1 and anti-human serum albumin), is only approximately 25 kDa in size, and is too small to have desirable pharmacokinetics for therapeutic purposes. Its association with HSA, which is meant to stabilize its half-life, is only 34 nM, which means it is often in a dissociated state with respect to HSA. Single-domain antibodies (sdAbs) that have been tested so far are expressed in E. coli, and are prone to aggregation (unfolding) during manufacturing. Additionally, sdAbs prepared cytoplasmically (from direct expression in E. coli) often lack the conserved disulfide bond found in variable heavy domains, which both decreases their melting point and can decrease their ability to refold. The rapid clearance and short elimination half-life of small antibody fragments, which can be less than a few hours, decreases the in vivo efficacy and necessitates frequent administration and/or continuous infusion, which can reduce patient compliance. Because these molecules (see, e.g., Holland et al. (2013) J Clin Immunol 33(7):1192-203) were produced in E coli, and were often not correctly folded, leading to poor solubility and immunogenicity, resulting in their clinical failure (see, e.g., adisinsight.springer.com/drugs/800037882).

[0764] The constructs, such as the TNFR1 antagonist constructs, provided herein address this problem as well as other problems, such as the immunogenicity, and reactions with pre-existing antibodies. Provided herein are constructs containing small antibody fragments, such as dAbs, with specificity towards TNFR1 and/or TNFR2, that exhibit improved pharmacological, such as pharmacokinetic, properties, including longer serum half-life, increased stability, reduced/slower peripheral clearance, and lower immunogenicity compared to the dAbs of the prior art.

[0765] Therapeutic antibodies of a variety of structures can be potent and well-tolerated therapeutics. Antibodies are used for the treatment of a variety of diseases and conditions, including, for example, rheumatoid arthritis (e.g., adalimumab, sold under the trademark Humira®); cancers, such as non-Hodgkin's lymphoma (e.g., rituximab and ibritumomab tiuxetan, sold under the trademarks Rituxan® and Zevalin®, respectively) and breast and gastric cancers (e.g., trastuzumab, sold under the trademark Herceptin®); and respiratory syncytial virus infection (e.g., palivizumab, sold under the trademark Synagis®). Manufacturing of complete antibodies has several limitations, such as the reliance on mammalian cell expression. As a result, antigen-binding fragments of antibodies, such as Fabs (˜57 kDa) and single chain Fv fragments (scFvs, ˜27 kDa), and other structures, which can be selected in vitro, such as with phage display (circumventing animal immunization), and which can be manufactured in large quantities using bacterial or yeast cell cultures, have been developed. A Fab fragment contains a V_{H}-C_{H}1 polypeptide, linked to a V_{L}-C_{L} polypeptide via a disulfide bond; an scFv is a fusion protein containing a V_{H} domain and V_{L} domain linked by a short polypeptide linker. Another class of therapeutic, small fragments of antibodies are domain antibodies (dAbs; also known as single domain antibodies, or sdAbs), which are monomeric and contain a variable domain of the heavy chain (V_{H}) or of the light chain (V_{L}) of an antibody. dAbs are the smallest antigen-binding fragments of antibodies; they are approximately 11-15 kDa in size, which is about one-tenth the size of a full monoclonal antibody (mAb) (see, e.g., Holt et al. (2003) Trends in Biotechnology 21(11):484-490). Similar to dAbs, nanobodies (Nbs) are small antigen-binding fragments derived from camelid heavy-chain antibodies that are devoid of light chains. Nanobodies are small (˜15 kDa), have low immunogenicity and high affinity, are soluble and stable, and are encoded by a single gene/exon (VHH), so that they are modular, which allows for high yield production in bacteria and yeasts (see, e.g., Steeland et al. (2015) J. Biol. Chem. 290(7):4022-4037; Steeland et al. (2017) Sci. Reports 7:13646).

[0766] i. Fab- and scFv-Based TNFR1 Antagonists

[0767] As discussed above, the humanized semi-agonistic/antagonistic TNFR1-specific antibody, ATROSAB, inhibits TNFR1-mediated cellular responses. ATROSAB exhibits some TNFR1 agonistic activity, likely due to its bivalent molecular structure or by virtue of its binding to TNFR1, in the absence of TNF. The parental mouse antibody, H398, possesses stronger inhibitory potential, which is due to the faster dissociation of ATROSAB (i.e., a higher k_{off} value) compared to H398. This was determined using quartz crystal microbalance (QCM) measurements, in which antigen density on the chip was reduced to favor monovalent interactions; a slower dissociation of monovalently bound H398 from TNFR1, and the resulting longer receptor occupation, contributes to the improved blockade of TNFR1. Thus, to eliminate the TNFR1 agonistic activity of ATROSAB, and to improve its TNFR1 antagonistic activity, monovalent derivatives of ATROSAB were developed.

[0768] To increase the affinity and antagonistic activity of ATROSAB, the single-chain variable fragment (scFv) of ATROSAB was subjected to a first affinity maturation by site-directed mutagenesis of exposed residues within individual CDRs, or combinations of CDRs, and selection by phage display against human TNFR1-Fc. The scFv of ATROSAB contains the V_{H} domain, corresponding to residues 1-115 of the ATROSAB heavy chain (see, SEQ ID NO:31), linked by a short peptide linker to the V_{L} domain, corresponding to residues 1-113 of the ATROSAB light chain (see, SEQ ID NO:32). A clone, scFv IG11 (see, SEQ ID NO:674), with 6 mutations within CDR-H2 of the ATROSAB heavy chain, Y52V, Y54T, S55Q, H57E, Y59K, and E62D, with reference to SEQ ID NO:31, exhibited slower receptor dissociation and improved equilibrium binding to human TNFR1-Fc, and improved inhibition of TNF-induced TNFR1 activation. This clone was further subjected to random mutagenesis, generating the clone scFv T12B (see, SEQ ID NO:675), containing the mutations Q1H, Y52V, Y54S, S55Q, H57E, Y59K, and E62D in the V_{H} domain (with reference to SEQ ID NO:31), and S96G in the V_{L} domain (with reference to SEQ ID NO:32). scFv T12B had reduced dissociation from immobilized TNFR1-Fc compared to the scFv of ATROSAB and to scFv IG11, and increased TNFR1 inhibitory activity (see, e.g., Richter et al. (2019) mAbs 11(1):166-177; see, also, Richter, F. Thesis, entitled “Evolution of the Antagonistic Tumor Necrosis Factor Receptor One-Specific Antibody ATROSAB,” Universitat Stuttgart, 2015; available from pdfs.semanticscholar.org/d8e7/8b87d76dce36225c1d497939ef37445cfa8a.pdf).

[0769] The humanization of H398 was re-engineered by an exchange of VH and VL framework regions of H398 with alternative germline genes to optimize CDR arrangement. scFv 13.7, containing the VH domain of scFV T12B, linked by a short peptide linker to a newly humanized VL domain of H398, had similar binding to human TNFR1-Fc in ELISA and QCM, improved inhibition of TNF-induced TNFR1 activity, and improved thermal stability, with a 10 degree Celsius higher melting temperature compared to scFv T12B. Based on scFv 13.7, an IgG and a Fab, with constant regions identical to ATROSAB, were generated (IgG 13.7 and Fab 13.7, respectively), which had increased binding to TNFR1 compared to ATROSAB (1.4-fold) and the Fab of ATROSAB (Fab ATR; 8.7-fold), respectively. Fab 13.7 also had reduced dissociation from immobilized TNFR1-Fc, compared to Fab ATR, with an 18.8-fold improved monovalent affinity. Thus, affinity maturation and framework replacement resulted in improved binding to TNFR1 for Fab 13.7. Fab 13.7 and IgG 13.7 displayed selectivity towards TNFR1-Fc and did not bind to a TNFR2-Fc fusion protein; Fab 13.7 bound to human and rhesus TNFR1-Fc, but not to mouse and rat TNFR1-Fc, showing a similar binding pattern to ATROSAB. In vitro, monovalent Fab ATR and Fab 13.7 did not activate TNFR1, while ATROSAB displayed marginal activation of TNFR1 activity and IgG 13.7 strongly activated TNFR1. The agonistic activity of IgG 13.7 can be due to the improved affinity and slower dissociation from TNFR1, resulting in the formation of stable signaling competent receptor-antibody complexes. Fab 13.7 displayed improved inhibition of TNFR1 activity compared to Fab ATR and to ATROSAB, and lacked any agonistic activity. Incubation of Fab 13.7 or ATROSAB with cross-linking anti-human Fab serum, revealed that Fab 13.7 does not activate TNFR-1, while ATROSAB does (see, e.g., Richter et al. (2019) mAbs 11(1):166-177).

[0770] Compared to ATROSAB, which has an initial half-life of 0.44 hours, a terminal half-life of 32.1 hours, and an area under the curve (AUC) of 181 μg/ml×h, Fab 13.7 (with a molecular mass of ˜47 kDa). Fab 13.7 displayed an initial half-life of 0.08 h, a terminal half-life of 1.4 h, and an AUC of 4.2 μg/ml×h, which were similar to the values obtained for Fab ATR. To extend the half-life, a Fab′ fragment, Fab′ 13.7, was generated by introducing a free cysteine residue at the C-terminus of the CH1 domain, which was chemically coupled to a branched PEG_{40 kDa} moiety, generating Fab 13.7PEG. Fab 13.7 also was fused through its Fd and a short flexible linker to the N-terminus of mouse serum albumin (MSA), generating Fab13.7-MSA. A monovalent Fab-Fc fusion protein was generated by fusing Fab 13.7 to a modified Fc, lacking the cysteine residues in the hinge region and the ability to dimerize via the CH3 domain, generating a one-armed half-IgG molecule (IgG1_{half}13.7). A monovalent Fv-Fc molecule also was generated by fusing the VH and VL domains to a hetero-dimerizing knob-into-hole (kih) Fc chain lacking the cysteine residues in the hinge region (Fv13.7-Fcₖᵢₕ). None of the derivatives showed any agonistic TNFR1 activity, and, compared to Fab 13.7, a slightly reduced binding to human TNFR1-Fc was observed for Fab13.7PEG, Fab13.7-MSA and IgG1_{half}13.7; binding of Fv13.7-Fcₖᵢₕ was not affected. Inhibition of TNF-mediated TNFR1 activity was reduced by 1.5-3.3 fold compared to Fab 13.7; Fab13.7PEG showed the strongest impairment in function, and Fv13.7-Fcₖᵢₕ showed the lowest change in bioactivity. IgG_{half}13.7 showed a similar half-life to Fab 13.7, and an AUC value that was increased by 7.1-fold. Fab13.7PEG, Fab13.7-MSA and Fv13.7-Fcₖᵢₕ had extended terminal half-lives, with values of 14.4 h, 9.7 h, and 10.5 h, respectively, and increased AUC values. Thus, the fusion protein Fv13.7-Fcₖᵢₕ, which was engineered for heterodimeric assembly of two peptide chains by using knobs-into-holes technology, displayed the best combination of improved pharmacokinetic properties and TNFR1 antagonistic activity (see, e.g., Richter et al. (2019) mAbs 11(1):166-177; see, also, Richter, F. Thesis, entitled “Evolution of the Antagonistic Tumor Necrosis Factor Receptor One-Specific Antibody ATROSAB,” Universität Stuttgart, 2015; available from pdfs.semanticscholar.org/d8e7/8b87d76dce36225c1d497939ef37445cfa8a.pdf).

[0771] In another study, to improve the pharmacokinetic properties, such as serum half-life, of Fab 13.7, an IgG-like Fc was incorporated into the molecule, while retaining the Fab-like heterodimerization of the polypeptide chains. To achieve this, the variable domains of the heavy and light chains of Fab 13.7 were fused to the N-termini of newly generated heterodimerizing Fc chains, known as Fc-one/kappa (Fc1κ). The Fc heterodimerization approach is based on interspersed Ig domains, derived from the heterodimerizing IgG1 constant heavy chain domain, CH1, and the kappa light chain constant domain, CLκ, and containing sections of the IgG1 CH3 sequence to mediate FcRn binding and enable FcRn-mediated drug recycling in vivo. The interspersed Ig domains include “CH31,” which contains amino acid sequence fragments of CH1 and CH3, and “CH3kappa” (CH3κ), which contains amino acid sequence fragments of CLκ and CH3. IgG1 CH2 domains also were fused to the N-termini of the CH31 and CH3κ domains, to include the entire FcRn binding region of the IgG molecule. Addition of the IgG1 hinge region to the N-termini of the CH2 domains results in a covalently linked heterodimerizing Fc moiety, known as Fc1κ. In contrast to other Fc heterodimerization technologies, such as knobs-into-holes, which involve replacement of one or more amino acids at the CH3-CH3 interface, Fc heterodimerization was achieved by exchanging larger amino acid sequence stretches obtained from human antibody sequences. Asymmetric scFv-Fc1κ fusion proteins were prepared and compared to scFv fusions with Fcs containing knobs-into-holes, and heterodimer formation was similar or improved, compared to the fusions containing knobs-into-holes technology (see, e.g., Richter et al. (2019) mAbs 11(4):653-665).

[0772] The variable domains of the TNFR1-specific Fab 13.7 molecule were fused to the CH2 domain N-termini of the CH31- or CH3κ-containing Fc chains with a short peptide linker, by fusing the VH to the CH2-CH3κ chain and the VL to the CH2-CH31 chain (VL13.7-CH2-CH31/VH13.7-CH2-CH3κ; VL1C/VHκC), generating the monovalent TNFR1-specific antagonistic antibody-derived molecule (Fv-Fc1κ fusion protein), known as Atrosimab (72 kDa in size). Atrosimab lacks the ability to mediate Fc effector functions, due to mutations that were introduced into Fc1κ; the lack of binding to effector molecules of the immune system prevents the activation of TNFR1 due to secondary crosslinking of Atrosimab bound to cells expressing FcγRs. Atrosimab bound to TNFR1 with high affinity (K_{D} 2.7 nM), inhibited TNF-induced activation of TNFR1 with IC₅₀ values of 16-55 nM in various in vitro assays, and in the presence of anti-human IgG antibodies (i.e., cross-linking antibodies), and displayed improved pharmacokinetic properties. Compared to the parental Fab 13.7 molecule, TNFR1 binding and inhibition was slightly reduced, which can be attributed to alterations in the VH and VL pairing after fusion to the CH2 domain. The initial and terminal half-lives of Atrosimab were determined to be 2.2+/−1.2 h and 41.7+/−18.1 h, respectively, and the AUC was 5856+/−1369.9 μg/ml×h. The terminal half-life of Atrosimab was extended almost 40-fold compared to that of Fab 13.7, and was extended by 1.3-fold compared to ATROSAB; these values may be inaccurate, however, because the injected doses of Fab 13.7 and ATROSAB were lower, which can affect pharmacokinetic properties (see, e.g., Richter et al. (2019) mAbs 11(4):653-665).

[0773] ii. Domain Antibody (dAb)-Based TNFR1 Antagonists

[0774] Another class of therapeutics, small fragments of antibodies, are domain antibodies (dAbs; also known as single domain antibodies, or sdAbs), which are monomeric and contain a variable domain of the heavy chain (V_{H}) or of the light chain (V_{L}) of an antibody. dAbs are the smallest antigen-binding fragments of antibodies; they are approximately 11-15 kDa in size, which is about one-tenth the size of a full monoclonal antibody (mAb). Similar to dAbs, are the nanobodies that occur in camelids, which produce antibodies that contain only heavy chains, where the antigen-binding site is a single unpaired variable domain, known as a V_{HH}. In a dAb, there are three complementarity determining regions (CDRs) on each V_{H} and each V_{L}; thus, each dAb contains three out of the six CDRs from a V_{H}-V_{L} pair in an antibody, which are the highly diversified loop regions that bind to the target antigen.

[0775] Due to their smaller size, dAbs are produced at higher yields from bacterial cultures, and are more amenable to phage display, since only a single polypeptide chain is produced. Specific dAbs with high affinities and potencies rapidly can be produced by protein engineering. The small size of dAbs also allows for increased tissue penetration, stability, and choice of delivery formulations. Due to their small size, it is possible to create molecules containing linked dAbs that are specific for different antigens/targets, which is not possible with conventional antibodies, and is difficult to achieve for other antibody fragments, such as Fabs and scFvs. Due to the monomeric and monovalent binding modality of dAbs, they suitable for use where the targets are not amenable to intervention with monoclonal antibodies. TNFR1 is one such target; TNFR1 is activated/agonized by antibody-induced receptor cross-linking (see, e.g., Holt et al. (2003) Trends in Biotechnology 21(11):484-490; Schmidt et al. (2013) Arthritis & Rheumatism 65(9):2262-2273; Goodall et al. (2015) PLoS ONE 10(9):e0137065).

[0776] Small size antibody fragments, such as dAbs, scFvs, Fvs, disulfide-bonded Fvs and Fabs, are easier to produce and handle, and are distributed rapidly throughout the body, in comparison to larger molecules; however, their short in vivo half-life limits their therapeutic efficacy. As with other antibody fragments, increasing the serum half-life of dAbs increases the therapeutic efficacy and decreases the frequency of dosing, particularly in applications that require binding antigens in the bloodstream, such as in the treatment of rheumatoid arthritis or cancer. This can be achieved by PEGylation, conjugation to serum albumin, fusion with a second dAb with specific binding to serum albumin, or fusion to an Fc fragment or complete antibody constant regions. Fusion with an Fc region also allows for the recruitment of Fc effector functions, including complement activation, antibody-dependent cellular cytotoxicity, or Fc-mediated clearance of immune complexes (see, e.g., Holt et al. (2003) Trends in Biotechnology 21(11):484-490; Goodall et al. (2015) PLoS ONE 10(9):e0137065).

[0777] a) Anti-TNFR1 dAb-Anti-Albumin dAb Fusion Constructs

[0778] DMS5540 is a 25 kDa mouse TNFR1 antagonist, that is a bispecific single variable domain antibody, containing a noncompetitive (does not interfere with TNF binding) anti-TNFR1 dAb, fused with an albumin-binding dAb (AlbudAb; to extend serum half-life). DMS5540, which does not bind human TNFR1, was found to inhibit TNFα-mediated cytotoxicity in the mouse fibroblast cell line L929 (which is highly sensitive to TNFα-mediated cytotoxicity). DMS5540 was administered to mice intravenously, followed four hours later with an intravenous bolus injection of TNFα, and serum TL-6 levels were assessed. DMS5540 demonstrated a dose-dependent inhibition of TNFα-mediated signaling effects in vivo, as determined by a decreased TL-6 response, when compared to mice administered a control dAb lacking specific antigen binding but fused to AlbudAb (DMS5538), or no dAb (see, e.g., Goodall et al. (2015) PLoS ONE 10(9):e0137065).

[0779] In another study, mice with collagen-induced arthritis (CIA) were treated, beginning on the day of arthritis onset, for 10 days with DMS5540, an isotype (negative) control dAb (DMS5538), or murine TNFR2 genetically fused with mouse IgG1 Fc domain (mTNFRII-Fc; mTNFR2.Fc), which blocks both receptors (TNFR1 and TNFR2) and inhibits mouse TNF, and disease progression was monitored. The concentrations of systemic cytokines were measured, the numbers of T cell subsets in lymph nodes and spleens were assessed, and intrinsic Treg cell function was evaluated. Disease progression was suppressed similarly by blockade of TNFR1 with DMS5540 and blockade of TNFR1/2 with mTNFRII-Fc, compared to the negative control, indicating that blockade of TNFR1 or TNF protects joints from inflammatory mediators that result in joint damage in arthritis. Effector T cell activity, measured in terms of the expression levels of proinflammatory cytokines (e.g., IFNγ, IL-10 and RANTES), was increased following blockade of TNFR1/2 with mTNFRII-Fc, but not following the selective blockade of TNFR1 with DMS5540, indicating an immunoregulatory role (e.g., T cell effector function suppression) for TNFR2 signaling. Additionally, blockade of TNFR1, but not of TNFR1/2, resulted in the expansion and activation of Treg cells, while an increase in the expression of FoxP3 and TNFR2, both of which are expressed by Tregs, was observed in joints undergoing remission, indicating their role in the resolution of inflammation. These results indicate that inhibiting TNFR1, but not TNFR2, signaling inhibits inflammation and promotes Treg cell suppressor activity, resulting in enhanced therapeutic efficacy compared to traditional methods of TNF inhibition (see, e.g., McCann et al. (2014) Arthritis & Rheumatology 66(10):2728-2738).

[0780] DMS5540 also more effectively prevents inflammation-induced osteoclast formation and bone loss, than mTNFR2.Fc (anti-TNF), in an in vivo mouse model of lipopolysaccharide (LPS)-induced osteolysis. TNFR2-deficient mice displayed an increase in LPS-induced bone destruction. In vitro, the human equivalent of DMS5540, DMS5541, which contains an anti-human TNFR1 dAb, reduced human osteoclastogenesis in the presence and absence of low-dose TNF more effectively than etanercept. These results indicate an osteo-protective role for TNFR2 signaling. As a result, selective inhibition of TNFR1 also can be used for therapeutic intervention in inflammatory bone loss disorders, such as osteomyelitis and periprosthetic osteolysis and aseptic loosening (see, e.g., Esperito Santo et al. Biochem. Biophys. Res. Commun. 464:1145-1150).

[0781] DMS5541 (also known as TNFRI-AlbudAb), which contains a noncompetitive human TNFR1-specific dAb fused to AlbudAb, was evaluated for the selective blockade of TNF signaling via TNFR1, in ex vivo cultured human rheumatoid arthritis (RA) synovial membrane mononuclear cells (MNCs), which express TNFR1 and TNFR2, and produce inflammatory cytokines and chemokines spontaneously, in the absence of exogenous stimulation. DMS5541 inhibited the production of the proinflammatory cytokines GM-CSF, IL-10, IL-1β and IL-6, and the chemokines IL-8, RANTES (CCL5) and MCP-1 (CCL2), at similar levels to TNF ligand blockade with etanercept. This inhibition was not due to cellular toxicity, as DMS5541 inhibited TNFα-induced cytotoxicity in human rhabdomyosarcoma KYM-1D4 cells in a dose-dependent manner, similar to TNF blockade with etanercept. In addition, DMS5541 inhibited the production of soluble TNFR1, but not soluble TNFR2, demonstrating selectivity for TNFR1. These results indicate that the TNFR1 pathway is the dominant inflammatory pathway that is responsible for the TNF response observed in the ex vivo cultured RA synovial membrane MNC disease model (see, e.g., Schmidt et al. (2013) Arthritis & Rheumatism 65(9):2262-2273).

[0782] b) Domain Antibody Fragments Designated GSK1995057 and GSK2862277

[0783] The domain antibody fragment designated GSK1995057 (see, SEQ ID NO:55) is a short-acting, fully human domain antibody (dAb) fragment (containing a V_{H} chain) that selectively antagonizes TNF signaling through TNFR1, but not TNFR2. Due to its small size, GSK1995057 can be nebulized directly to the lungs, and has been investigated in the treatment of animal and human models of acute respiratory distress syndrome (ARDS) via inhalation. GSK1995057 reduces pulmonary inflammation in non-human primate (cynomolgus monkey) and human models of ARDS. Pulmonary neutrophil infiltration is central to the pathogenesis of ARDS, and is increased by damage to the alveolar-capillary barrier caused by the action of proinflammatory mediators. TNF-α contributes to increased endothelial permeability, and GSK1995057 prevents this increase, indicating that TNFR1 signaling mediates TNF-induced endothelial permeability (see, e.g., Proudfoot et al. (2018) Thorax 73:723-730). Because of its inherent short half-life and neutralization by autoantibody, the trial failed. The immunogenicity of GSK1995057 may be due more to improper folding of the protein made in E coli than as a failure to properly humanize the dAb; it was derived from a human antibody fragment, and only the hypervariable sequences were altered to adapt specificity for TNFR1 (see, e.g., International PCT Publication No. WO2008/149148A2).

[0784] In monkeys exposed to a single inhaled lipopolysaccharide (LPS) challenge, which is a well-established model that triggers a clinically relevant inflammatory response modeling subclinical tissue injury, pretreatment with GSK1995057 reduces pulmonary neutrophil infiltration, levels of proinflammatory chemokines, markers of endothelial injury and alveolar-capillary leak, in a dose-dependent manner. The results indicate that inhaled GSK1995057 can effect the same results as higher doses of parenterally administered antibodies. In a clinical trial, in which healthy human subjects were pretreated with a single nebulized dose of GSK1995057 and then exposed to a low dose of inhaled LPS, the pretreated subjects experienced less systemic inflammation, as well as less neutrophilic lung inflammation and signs of endothelial injury in response to LPS challenge, in comparison to subjects who received a placebo. Despite these results, translation into the clinic is not likely. In the trial GSK1995057 was administered prior to the LPS challenge, but patients with ARDS, generally require treatment after the initial injury (see, e.g., Proudfoot et al. (2018) Thorax 73:723-730), not before.

[0785] Another difficulty is the detrimental effects of anti-drug antibodies (ADAs) on anti-TNFR1 agents, which were observed in a clinical Phase I study of GSK1995057, in which cytokine release infusion reactions, at doses of 2-10 μg/kg, were observed due to high levels of pre-existing, naturally occurring anti-immunoglobulin autoantibodies, (i.e., ADAs) present in approximately 50% of drug naïve, healthy subjects. Specifically, the ADAs were human anti-V_{H} (HAVH) autoantibodies, and the complex of HAVH autoantibodies with framework sequences of GSK1995057 resulted in the activation of TNFR1 signaling, and the occurrence of mild to moderate infusion reactions in subjects with high HAVH autoantibody titers (see, e.g., Cordy et al. (2015) Clin. Exp. Immunol. 182:139-148).

[0786] The binding of HAVH autoantibodies to a framework region of the dAb GSK1995057 induces cytokine release in vitro. The epitope on GSK1995057 for the autoantibodies was characterized. Pre-existing anti-drug antibodies (ADAs) bind to an epitope close to the C-terminal regional of V_{H} dAbs, including the dAb GSK1995057. To counter this, a modified dAb, designated GSK2862277 (see, SEQ ID NO:56) was generated by adding a single alanine residue at the C-terminus of the modified dAb. This modification reduced binding to HAVH autoantibodies. In serum samples from healthy subjects that screened positive for HAVH autoantibodies that bind to GSK1995057, the frequency of pre-existing autoantibodies decreased from 51% for GSK1995057-specific HAVH autoantibodies, to 7% for GSK2862277-specific autoantibodies. Human in vitro systems and animal in vivo experiments showed that GSK2862277 does not induce TNFR1 activation, even in the presence of GSK2862277-specific autoantibodies, and that the pharmacology and biophysical properties of GSK2862277, including target affinity, in vitro potency and in vivo pharmacokinetics and pharmacodynamics, is comparable to those of the parent dAb (GSK1995057).

[0787] A Phase I clinical trial to investigate the safety, tolerability, pharmacokinetics and pharmacodynamics of single and repeat doses of inhaled (i.h.) and intravenous (i.v.) GSK2862277 found that GSK2862277 was generally well tolerated when administered via inhalation or intravenously. One subject, however, had a mild infusion reaction with cytokine release after repeated IV dosing; this subject had high serum levels of pre-existing antibodies to GSK2862277, and the serum antibodies from this subject were shown to activate TNFR1 signaling in an in vitro assay. The interaction between GSK2862277 and the autoantibodies result in antibody-mediated, GSK2862277-dependent cross-linking of cellular TNFR1, agonizing the receptor and leading to cytokine release. Thus, despite the reduced binding of GSK2862277 to pre-existing HAVH autoantibodies, adverse effects were still associated with the presence of a new pre-existing antibody response, that was specific to the modified dAb framework. These results highlight challenges in developing biological antagonists against TNFR1 (see, e.g., Cordy et al. (2015) Clin. Exp. Immunol. 182:139-148). Thus, there remains a need for improved TNFR1 antagonists.

[0788] iii. Nanobodies (Nbs)

[0789] Similar to dAbs, nanobodies (Nbs) are small antigen-binding fragments derived from camelid heavy-chain antibodies that are devoid of light chains. They are small (15 kDa), have low immunogenicity and high affinity, are soluble and stable, and are encoded by a single gene/exon (VHH), making them modular and allowing for high yield production in bacteria or yeasts.

[0790] iv. Anti-TNFR1 Nanobody-Anti-Albumin Nanobody Fusion Constructs

[0791] TROS (TNF Receptor One-Silencer; also called Nb Alb-70-96) is a trivalent high-affinity nanobody-based selective inhibitor of human TNFR1 that competes with TNF for binding to TNFR1. To generate TROS, two anti-human TNFR1 nanobodies (Nb 70 and Nb 96; see, SEQ ID NOs: 683 and 684, respectively), which had been generated from a VHH library that was constructed by immunization of alpacas with recombinant human soluble TNFR1, were linked and, via (Gly₄Ser)₃ linkers, were linked to an anti-albumin nanobody (Nb Alb) to increase serum half-life to produce the trivalent TROS. The serum half-life of the resulting TROS is ˜24 hours; the serum half-life of monovalent Nbs is only ˜1.5 hours. Treatment with TROS delays disease onset in mouse experimental autoimmune encephalomyelitis (EAE; a model of MS), and prevents established disease; the therapeutic effects are due to the diversion of TNF to signal through TNFR2, and the effects of such signaling. TROS also inhibits inflammation in ex vivo cultured colon biopsies of Crohn's disease patients, and antagonizes inflammation in a model of acute TNF-induced liver inflammation in liver chimeric humanized mice (see, e.g., Steeland et al. (2015) J. Biol. Chem. 290(7):4022-4037; Steeland et al. (2017) Sci. Reports 7:13646).

[0792] c. Dominant-Negative Inhibitors of TNF (DN-TNFs)/TNF Muteins

[0793] Another class of TNF inhibitors are the signaling-incompetent dominant-negative inhibitors of TNF (DN-TNFs), also known as TNF muteins. The DN-TNFs are engineered variants of TNF with mutations that abrogate binding to and signaling through TNFR1 and TNFR2. DN-TNFs selectively inhibit soluble TNF (sTNF or solTNF) by rapidly exchanging subunits with native TNF homotrimers, forming inactive mixed TNF heterotrimers with disrupted receptor binding surfaces, thus preventing interaction with TNF receptors. DN-TNFs leave transmembrane TNF (tmTNF) unaffected, maintaining the protective roles of TNF signaling through TNFR2. DN-TNFs inhibit TNF-induced NF-κB activity and caspase-mediated apoptosis, and reduce disease severity in animal models of arthritis and Parkinson's disease. These molecules because of their structure likely are immunogenic.

[0794] As selective inhibitors of soluble TNF, DN-TNFs, unlike anti-TNF therapies that bind to solTNF and to tmTNF, do not inhibit tmTNF signaling, and do not suppress the resistance of mice to infection by L. monocytogenes. Examples of DN-TNFs are TNF mutants containing one or more of the replacements L133Y, S162Q, Y163H, I173T, Y191Q and A221R, with reference to the sequence of amino acids set forth in SEQ ID NO:1 (corresponding to residues L57Y, S86Q, Y87H, I97T, Y115Q, and A145R, with reference to the sequence of solTNF, as set forth in SEQ ID NO:2), which impair binding to TNFRs. Additional modifications, for example, to improve expression, allow site-specific PEGylation, also can be included (see, e.g., Zalevsky et al. (2007) J. Immunol. 179:1872-1883).

[0795] For example, the TNF mutations R32W and S86T, with reference to SEQ ID NO:2, result in a several hundred-fold loss in affinity towards TNFR2, but do not affect binding to TNFR1. The R32W/S86T double mutant abrogates all binding to TNFR2, with no loss in binding to TNFR1. The mutations L29S, L29G, L29Y, R31E, R31N, R32Y, R32W, S86T, L29S/R32W, L29S/S86T, R32W/S86T, L29S/R32W/S86T, R31N/R32T, R31E/S86T, R31N/R32T/S86T, and E146R, with reference to SEQ ID NO:2, also impart selectivity towards TNFR1. The mutations D143N, D143Y, A145R and D143N/A145R, with reference to SEQ ID NO:2, render the TNF variants selective for TNFR2 (see, e.g., Loetscher et al. (1993) J. Biol. Chem. 268(35):26350-26357; U.S. Pat. No. 5,422,104).

[0796] A modified TNF, designated XPro1595 (INmuneBio; see, SEQ ID NO:701), is a PEGylated, soluble DN-TNF mutein that preferentially inhibits TNFR1 signaling, and contains the mutations V1M, R31C, C69V, Y87H, C101A and A1456R, with reference to SEQ ID NO:2 (see, e.g., U.S. Publication No. 2015/0239951). XPro1595 decreases neuroinflammation and is being investigated in the treatment of Alzheimer's disease (see, e.g., clinical trial identifier No. NCT03943264). XPro1595 blocks the development of amyloid pathology in a mouse model of Alzheimer's Disease (3×TgAD), prevents the loss of neuron communication and cognitive impairment in a different (tgCRND8) mouse model of Alzheimer's Disease, attenuates the dysfunction in neuronal communication and cognitive deficit in normal aged rats, and prevents young mice from developing amyloid pathology, cognitive impairment, and dysfunction in neuronal communication, in a third model (5×FAD) of Alzheimer's disease. In older mice that have Alzheimer's-like pathology, XPro1595 reduced amyloid, improved cognition, rescued neuron communication, and also, normalized innate and adaptive immune responses.

[0797] The levels of TNFR1 are higher in the hippocampus, in comparison to TNFR2, in aged (22 months) but not young adult (6 months) Fischer 344 rats. When treated with XPro1595, aged rats exhibit improved Morris Water Maze performance, reduced microglial activation, reduced susceptibility to hippocampal long-term depression, increased levels of the GluR1 type glutamate receptors, and lower L-type voltage sensitive Ca²⁺ channel (L-VSCC) activity in hippocampal CA1 neurons, indicating that functional changes associated with brain aging can occur from selective alterations in TNF signaling. In animal models of Parkinson's disease and aging, XPro1595 suppresses neuroinflammation and the activation of microglia. In EAE (a model of MS), XPro1595 ameliorates disease, improves remyelination and reduces CNS lesions and neuroinflammation. XPro1595 also ameliorates inflammatory arthritis, and decreases susceptibility to infection in treated animals. In comparison to etanercept, which had no therapeutic effect, treatment with XPro1595 delayed the onset of EAE and ameliorated symptoms more efficiently. XPro1595 administration increases the level of TNFR2 expression in the lesion area in EAE, indicating that tmTNF signaling via TNFR2 is implicated in neural regeneration (see, e.g., Yang et al. (2018) Front. Immunol. 9:784; Sama et al. (2012) PLoS ONE 7(5):e38170). Since XPro1595 does not inhibit the activity of transmembrane TNF (which activates TNFR1 and TNFR2), it cannot block the inflammatory effects of TNFR1. This also applies to other dominant negative TNF reagents, described below.

[0798] XENP345 (see, SEQ ID NO:702) is a PEGylated DN-TNF mutein, containing the mutations I97T/A145R, with reference to SEQ ID NO:2. The in vivo neutralization of soluble TNF (solTNF) by XENP345 in animal models of Parkinson's disease and Alzheimer's disease is neuroprotective, reduces neuronal degeneration and cognitive dysfunction, and slows down neurodegenerative disease progression (see, e.g., McCoy et al. (2006) J. Neurosci. 26(37):9365-9375; McAlpine et al. (2009) Neurobiol. Dis. 34(1):163-177).

[0799] R1antTNF (see, SEQ ID NO: 703) is a TNFR1-selective antagonistic mutant TNF, identified from a phage library displaying structural human TNF variants in which each of the six amino acid residues at the receptor-binding site, corresponding to residues 84-89 of SEQ ID NO:2, were mutated. R1antTNF, which contains the mutations A84S, V85T, S86T, Y87H, Q88N and T89Q, has similar affinity to TNFR1 as wild-type human TNF, and does not interfere with TNFR2 activity. R1antTNF ameliorated liver injury, as evidenced by reductions in the serum levels of alanine aminotransferase and the pro-inflammatory cytokines IL-2 and IL-6, in two models of acute hepatitis. The plasma half-life of R1antTNF, like wild-type TNF, however, is very short (12 min). To increase the in vivo half-life of R1antTNF, a PEGylated version, PEG-R1antTNF, in which PEG is bound to the N-terminal site of R1antTNF, was produced. PEG-R1antTNF decreases morbidity, ameliorates disease symptoms, improves demyelination in an EAE mouse model, and suppresses Th1 and Th17 cell activation and inflammatory T-cell infiltration in the spinal cord. PEG-R1antTNF also inhibits NF-κB, suppresses smooth muscle cell proliferation, and decreases chemokine and adhesion molecule expression, thus decreasing intimal hyperplasia and arterial inflammation in IL-1 receptor antagonist-deficient mice after inducing femoral artery injury in an external vascular cuff model. When the effects on antiviral immunity of PEG-R1antTNF and etanercept were compared using a recombinant adenovirus vector, PEG-R1antTMF did not reactivate viral infection and did not affect the clearance of injected adenovirus, while viral load increased after treatment with etanercept. PEG-R1antTNF treatment also delayed and ameliorated CIA symptoms in prophylactic and therapeutic settings, and was more effective than etanercept when used for the treatment of established CIA (see, e.g., Yang et al. (2018) Front. Immunol. 9:784; Shibata et al. (2008) J. Biol. Chem. 283(2):998-1007; Kitagaki et al. (2012) J. Atheroscler. Thromb. 19(1):36-46; Fischer et al. (2015) Antibodies 4:48-70; Horiuchi et al. (2010) Rheumatology (Oxford) 49:1215-1228).

[0800] Soluble TNFR1 also has been associated with an increased risk of developing MS; thus, neutralization of soluble TNFR1, which cannot be achieved with DN-TNFs/TNF muteins, can be beneficial. In contrast to inhibitors of solTNF, such as DN-TNFs, TNFR1 antagonists can block the binding of lymphotoxin-α (LT-α), another member of the TNF superfamily, to TNFR1. LT-α can have a proinflammatory role in RA and in animal disease models, such as CIA and EAE; thus, simultaneous blocking of TNF and LT-α binding to TNFR1 by TNFR1 antagonists can have additional benefits, in comparison to solTNF inhibition, in acute and chronic inflammatory diseases and disorders (see, e.g., Fischer et al. (2015) Antibodies 4:48-70).

[0801] 2. TNFR2-Selective Agonists

[0802] CD4⁺FoxP3⁺ regulatory T cells (Tregs) maintain immunological homeostasis and inhibit autoimmune responses; Tregs also modulate the antitumor immune response, allowing for tumor immune evasion. Tregs, thus, are a therapeutic target in the treatment of, for example, autoimmune and chronic inflammatory diseases and conditions, graft-versus-host disease (GvHD), transplantation rejection, and cancer. TNF signaling via TNFR2 regulates the function and activity of Tregs. TNFR2 agonists upregulate Treg activity, while TNFR2 antagonists downregulate Treg activity. The Treg-stimulatory effect of the TNF-TNFR2 signaling pathway can be leveraged for the treatment of several human diseases and disorders, including autoimmune and chronic inflammatory diseases, through agonism, and cancer, through antagonism (see, e.g., Zou et al. (2018) Front. Immunol. 9:594).

[0803] TNFR2 agonists include antibodies, such as monoclonal TNFR2 agonist antibodies, and antigen-binding fragments thereof, peptides and proteins, such as TNFR2-selective TNF muteins, fusion proteins, and small molecules. As provided herein, specific agonism of TNFR2 induces the expansion and activation of Tregs, which modulate the immune system, reduces the activity of autoreactive CD8⁺ T cells that damage tissues, and induces signaling pathways with anti-inflammatory, as well as cell survival, regeneration and protective effects, including neuro-protective, cardio-protective, gut-protective and osteo-protective effects. Thus, the enhancement of TNFR2 signaling with TNFR2-selective agonists can be used to enhance the therapeutic effects of TNFR1-specific antagonism, particularly in the treatment of autoimmune and chronic inflammatory diseases and disorders, including neurodegenerative diseases in which anti-TNF therapies/TNF-blockers have failed.

[0804] a. TNFR2 Agonistic Antibodies

[0805] Human TNFR2-selective agonist antibodies include the commercially available MR2-1 (a monoclonal mouse IgG1 that binds human, cynomolgus monkey and rhesus monkey TNFR2; Hycult Biotech), and clone MAB2261 (a monoclonal mouse IgG2A that binds human TNFR2; R&D Systems). TNFR2 agonists, such as antibodies, can potently stimulate the expansion of homogeneous populations of FoxP3⁺ Tregs in CD4 cell cultures, and upregulate the expression of TNF, TRAF2, TRAF3, BIRC3 (cIAP2) and FoxP3 mRNA. Magnetic-activated cell sorting (MACS)-purified CD4⁺CD25⁺ cells, cultured using standard in vitro human Treg expansion protocols (i.e., with anti-CD3 antibodies, anti-CD28 antibodies, IL-2 and rapamycin), yield expanded Tregs with higher levels of FoxP3 (and other characteristic Treg markers), and more potent suppressive capacities, when expanded in the presence of a TNFR2 agonist antibody, compared to in the absence of the TNFR2 agonist. Tregs isolated from a patient with type 1 diabetes, that exhibit a resting phenotype, are activated and expanded upon in vitro treatment with a TNFR2 agonist antibody; such Tregs are more potent in the inhibition of autologous CD8⁺ T cells (see, e.g., Zou et al. (2018) Front. Immunol. 9:594).

[0806] Treatment of isolated Tregs, expanded using the standard in vitro protocol, with MR2-1, a commercially available agonistic human TNFR2 monoclonal antibody (mAb) containing a mouse IgG1, generates homogenous populations of FoxP3⁺Helios⁺CD127^{low} Tregs; these Tregs maintain their phenotype and highly suppressive activity in a humanized mouse model. TNFR2 agonists, thus, can enhance the ex vivo expansion of Treg cells from impure cell populations, for use in Treg-based immunotherapy (see, e.g., Zou et al. (2018) Front. Immunol. 9:594).

[0807] b. TNFR2-Selective TNF Muteins and Fusions Thereof

[0808] As described herein, TNF can be engineered to selectively bind TNFR1 or TNFR2; for example, a TNFR2 selective TNF mutein is a variant of TNF that contains one or more mutations that increase binding to TNFR2 and/or reduce or eliminate binding to TNFR1. TNFR2-selective mutations include non-conservative substitutions of the Asp residue at position 143 of soluble TNF (see, SEQ ID NO:2), such as, for example, D143Y, D143F or D143N, or non-conservative substitutions of the Ala residue at position 145 of soluble TNF, such as, for example, A145R (see, e.g., U.S. Pat. No. 9,081,017). Other mutations in TNF that impart selectivity for TNFR2 include, but are not limited to, for example, K65W, D143E, D143W, D143V, A145H, A145K, A145F, A145W, E146Q, E146H, E146K, E146N, D143N/A145R, A145R/S147T, Q88N/T89S/A145S/E146A/S147D, Q88N/A145I/E146G/S147D, A145H/E146S/S147D, A145H/S147D, L29V/A145D/E146D/S147D, A145N/E146D/S147D, A145T/E146S/S147D, A145Q/E146D/S147D, A145T/E146D/S147D, A145D/E146G/S147D, A145D/S147D, A145K/E146D/S147T, A145R/E146T/S147D, A145R/S147T, E146D/S147D, D143V/F144L/A145S, and D143V/A145S, with reference to SEQ ID NO:2 (see, e.g., U.S. Patent Publication No. 2020/0102362).

[0809] TNF ligand trimerization is essential for signaling via TNFRs. At low concentrations, such as in serum, the trimers dissociate, resulting in their degradation. To generate functionally active, receptor-specific TNF muteins, it is necessary to create stable trimers. TNF07 is a soluble TNF (sTNF or solTNF) mutein, containing the mutations S95C/G148C (with respect to the sequence of residues set forth in SEQ ID NO:2), that forms a stable TNF trimer and functions as a TNFR2 agonist. The S95C/G148C mutations result in the formation of an intermolecular Cys-Cys covalent bond; a stable trimer is thus formed as a result of covalent internal disulfide cross-linking of sTNF at a strategic location between TNF monomers. TNF07 acts as a TNFR2 agonist despite lacking TNFR2-selective mutations. TNF07 induces potent TNFR2 signaling, expands FoxP3⁺ Treg cells, and selectively induces the death of autoreactive CD8⁺ T cells isolated from patients with type 1 diabetes (see, e.g., Ban et al. (2015) Molecular and Cellular Therapies 3:7; Zou et al. (2018) Front. Immunol. 9:594).

[0810] Several TNFR2 agonists, containing fusions of single-chain TNFR2-selective TNF mutein trimers, with multimerization domains, have been generated. As described herein, the primary ligand for TNFR2 is membrane-bound TNF (memTNF; also referred to herein as transmembrane TNF or tmTNF). The addition of multimerization domains, such as dimerization or trimerization domains, generates hexameric or nonameric molecules, respectively, with respect to the TNF subunits; these hexamers and nonamers of TNF mimic membrane-bound TNF trimers and thus, are capable of effectively activating TNFR2 signaling. Commonly used dimerization domains include EHD2, which is derived from the heavy chain C_{H}2 domain of IgE and MHD2, which is derived from the heavy chain C_{H}2 domain of IgM. Dimerization domains also can include Fc domains, such as those derived from IgG1 and IgG4, optionally including modifications that alter immune effector functions. Commonly used trimerization domains include chicken tenascin C (TNC) and human TNC. Dimerization and trimerization enhances TNFR2 signaling, and improves the half-life of the fusion protein, for example, by increasing the molecular weight of the molecule, and/or by introducing FcRn recycling, for example, when the dimerization domain is an Fc.

[0811] STAR2 (also known as TNC-sc-mTNF(221N/223R)) is a nonameric agonistic TNFR2-specific mouse TNF variant that does not bind TNFR1, and is a single-chain mouse TNF timer, where each TNF subunit is residues 91-235 of SEQ ID NO:5, fused to the trimerization domain of chicken tenascin C (cTNC), corresponding to residues 110-139 of SEQ ID NO:804 (see, also, SEQ ID NO:805). The three single-chain mouse TNF subunits are linked by two (GGGS)₄ peptide linkers (see, e.g., SEQ ID NO:707. Residues 116-120), and the TNC trimerization domain is linked to the N-terminus of the first TNF subunit in the single-chain trimer. The specificity of STAR2 for TNFR2 results from the mutations D221N and A223R (with reference to the sequence of mouse TNF, set forth in SEQ ID NO:5) within the individual TNF subunits, which creates a steric clash between STAR2 and mouse TNFR1. Fusion to the TNC trimerization domain causes spontaneous oligomer formation, creating three covalently linked TNF trimers, and mimicking membrane-bound TNF. STAR2 stimulates the proliferation of Tregs in vitro and in vivo in a TNFR2-dependent, IL-2-independent mechanism. Pretreatment of allogeneic hematopoietic stem cells with STAR2 prior to transplantation in mice prolonged the survival and decreased the severity of GvHD in a TNFR-2 and Treg-dependent manner. A human equivalent of the TNFR2-specific STAR2 agonist, TNC-scTNF(143N/145R), made of residues 9-157 of soluble TNF (see, SEQ ID NO:2), containing the mutations D143N/A145R with reference to SEQ ID NO:2 (solTNF), potently stimulated CD4⁺FoxP3⁺ Treg expansion in vitro from CD4⁺ T cells isolated from healthy donors (see, e.g., Chopra et al. (2016) J. Exp. Med. 213(9):1881-1900; Zou et al. (2018) Front. Immunol. 9:594).

[0812] TNC-scTNF_{R2} is a soluble human TNFR2 agonist that is a fusion of the trimerization domain of human tenascin C (hTNC), containing residues 110-139 of SEQ ID NO:806 (see, also, SEQ ID NO:807), to the N-terminus of a TNFR2-selective single-chain TNF variant (scTNF_{R2}; SEQ ID NO:803), contains three TNF domains connected by two short peptide linkers (GGGGS). The TNFR2-selective TNF molecule, scTNF_{R2}, resembles soluble trimeric TNF, and each TNF subunit includes amino acids 80-233 of the full length TNF set forth in SEQ ID NO:1 (corresponding to residues 4-157 of SEQ ID NO:2), with the mutations D143N/A145R, with reference to SEQ ID NO:2, which eliminate binding to TNFR1. Because TNFR2 is only fully activated by membrane-bound TNF, but not soluble TNF trimers, the trimerization domain of TNC is fused to the N-terminus of scTNF_{R2}, generating TNC-scTNF_{R2}. TNC-scTNF_{R2} exists in a trimeric assembly of the single stranded fusion protein and resembles a nonameric TNF molecule; this oligomeric TNF mutein, due to its increased avidity, mimics membrane-bound TNF (memTNF) activity, induces the clustering of TNFR2 and the formation of TNFR2 signaling complexes, efficiently activating TNFR2. TNC-scTNF_{R2} exhibits neuroprotective properties; it preserves neurons from superoxide-induced cell death and rescues neurons from catecholaminergic cell death. In an in vitro model of Parkinson's disease, TNC-scTNF_{R2} rescued neurons after induction of cell death by 6-OHDA. These results indicate that TNC-scTNF_{R2} can ameliorate neurodegenerative processes (see, e.g., Fischer et al. (2011) PLoS ONE 6(11):e27621).

[0813] EHD2-scTNF_{R2} (see, SEQ ID NO:810) is an agonistic TNFR2-selective TNF mutein fusion protein that contains a covalently stabilized human TNFR2-selective single-chain TNF trimer (scTNF_{R2}; SEQ ID NO:803) with the mutations D143N/A145R (residue numbering with respect to soluble TNF, as set forth in SEQ ID NO:2), which abrogate binding to TNFR1, fused to the dimerization domain EHD2 (SEQ ID NO:808), which is derived from the heavy chain C_{H}2 domain of IgE, and creates a disulfide bonded dimer that contains hexameric TNF domains. Each TNF subunit within scTNF_{R2} contains residues 4-157 of SEQ ID NO:2. EHD2 is fused to the N-terminal end of the trivalent human single-chain scTNF_{R2} via a peptide linker (GGGSGGGSGGGSGGGSGGGSGGSEFLA; SEQ ID NO:809), and the three TNF domains of scTNF_{R2} are connected via two GGGGS peptide linkers. EHD2-scTNF_{R2} exhibits neuroprotective properties in a mouse model of NMDA-induced acute neurodegeneration (see, e.g., Dong et al. (2016) Proc. Natl. Acad. Sci. U.S.A. 113(43):12304-12309; and U.S. Patent Publication No. 2020/0102362).

[0814] TNFR2 agonist fusion proteins also include single chain TNFR2 agonists (scTNF_{R2}) containing three TNF muteins with the mutations D143N/A145R (with reference to SEQ ID NO:2), which abrogate binding to TNFR1, fused with a dimerization domain that is an Fc, resulting in a protein that is hexameric with respect to the TNF domains (scTNF_{R2}-Fc). The Fc can be an IgG4 or IgG1 Fc, optionally containing mutations that eliminate Fc effector functions, such as ADCC and CDC. The three TNF muteins, which contain residues 12-157 of SEQ ID NO:2, are linked together by two short peptide linkers, and the dimerization domain is linked to the N-terminus or C-terminus of the single chain trimeric TNF molecule (scTNF_{R2}) by a third short peptide linker. The three linkers can all be the same or can be different, and can include GS linkers, such as (GGGGS)ₙ residues 116-121 of SEQ ID NO:707, and/or other combinations of Gly and Ser, where n=1-5, or can include all or a portion, at least 10, 15, or 20 contiguous residues, of the stalk region of TNF-α (GPQREEFPRDLSLISPLAQAVRSSSRTPSDK (SEQ ID NO:812), corresponding to residues 57-87 of SEQ ID NO:1). Dimerization enhances signaling by the TNFR2 agonist, and also improves the half-life of the fusion protein. Alternative dimerization domains that can be used in the fusion proteins include Fc fusion proteins derived from other dimerizing molecules, such as the IgE heavy chain domain 2 (EHD2; see, SEQ ID NO:808) and IgM heavy chain domain 2 (MHD2; see, SEQ ID NO:811) (see, e.g., International Application Publication No. WO 2019/226750).

[0815] 3. Anti-TNFR2 Antagonistic Antibodies and Small Molecule Inhibitors

[0816] TNFR2 antagonists inhibit the proliferation of and induce the death of Tregs, and also can inhibit the proliferation of and induce the death of TNFR2-expressing tumor cells. TNFR2 antagonists can reduce or inhibit the proliferation of myeloid-derived suppressor cells (MDSCs), and/or induce apoptosis within MDSCs, by binding TNFR2 expressed on the surface of MDSCs present in the tumor microenvironment. TNFR2 antagonists also induce the expansion of T effector cells, including cytotoxic CD8⁺ T cells, via the inhibition of Treg expansion and activity. As a result, TNFR2 antagonists can be useful in the treatment of infectious diseases, and certain cancers that express TNFR2, such as, for example, T cell lymphomas (e.g., Hodgkin's lymphoma and cutaneous non-Hodgkin's lymphoma), ovarian cancer, colon cancer, multiple myeloma, renal cell carcinoma, breast cancer, cervical cancer, endometrial cancer, glioma, head and neck cancer, liver cancer, and lung cancer (see, e.g., U.S. Patent Publication No. 2019/0144556; Torrey et al. (2017) Sci. Signal. 10:eaaf8608).

[0817] As discussed herein, expression of TNFR2 is restricted to particular immune cells, including Tregs and MDSCs, endothelial cells, and particular neurons and cardiac cells. The restricted expression of TNFR2 makes it an ideal drug target, as systemic toxicity from anti-TNFR2 therapeutics is less likely to occur.

[0818] TNFR2 antagonist antibodies and antigen-binding fragments thereof bind epitopes within human TNFR2 that contain one or more of the residues KCRPG (corresponding to residues 142-146 of SEQ ID NO:4), or a larger epitope, containing residues 130-149, 137-144 or 142-149, or at least 5 continuous or discontinuous residues within these epitopes, for example, and do not bind to the epitope containing residues KCSPG (corresponding to residues 56-60 of SEQ ID NO:4). TNFR2 antagonists also can bind the TNFR2 epitopes PECLSCGS (corresponding to residues 91-98 of SEQ ID NO:4), RICTCRPG (corresponding to residues 116-123 of SEQ ID NO:4), CAPLRKCR (corresponding to residues 137-144 of SEQ ID NO:4), LRKCRPGFGVA (corresponding to residues 140-150 of SEQ ID NO:4), and VVCKPCAPGTFSN (corresponding to residues 159-171 of SEQ ID NO:4), and/or an epitope containing at least 5 continuous or discontinuous residues within residues 75-128, 86-103, 111-128, or 150-190 of SEQ ID NO:4 (see, e.g., U.S. Patent Publication No. 2019/0144556).

[0819] In general, antagonistic TNFR2 antibodies or antigen-binding fragments thereof bind to an epitope containing one or more residues of the KCRPG sequence (SEQ ID NO:840), with an affinity that is at least 10-fold greater, for example, than the affinity of the same antibody or antigen-binding fragment for a peptide that contains the KCSPG sequence of human TNFR2 (SEQ ID NO:839). Antibodies or antibody fragments that bind epitopes containing one or more residues of the KCRPG sequence, and epitopes containing the KCSPG motif with similar affinity (e.g., less than a 10-fold difference in affinity), are not antagonistic TNFR2 antibodies. Antagonistic TNFR2 antibodies include TNFRAB1 (see, SEQ ID NOs:1213 and 1213 for the sequences of the heavy and light chains of TNFRAB1, respectively), TNFRAB2 and TNFR2A3 (see, e.g., U.S. Patent Publication No. 2019/0144556 for descriptions of these antibodies). TNFR2 antagonists also include antibodies and antibody fragments that contain the CDR-H3 sequence of TNFRAB1 (QRVDGYSSYWYFDV; corresponding to residues 99-112 of SEQ ID NO:1212), TNFRAB2 (ARDDGSYSPFDYWG; SEQ ID NO:1217) or TNFR2A3 (ARDDGSYSPFDYFG; SEQ ID NO:1223), or a CDR-H3 sequence with at least about 85% sequence identity thereto. TNFRAB1, for example, specifically binds residues 130-149, containing residues KCRPG of TNFR2, with a 40-fold higher affinity than residues 48-67, containing residues KCSPG of TNFR2 (see, e.g., U.S. Patent Publication No. 2019/0144556).

[0820] TNFRAB1 (see, SEQ ID NOs: 1212 and 1213 for heavy and light chains, respectively) is a murine antibody that antagonizes the TNF-TNFR2 interaction, and, in addition to binding the KCRPG sequence of TNFR2, also binds an epitope within residues 161-169 (CKPCAPGTF; SEQ ID NO:1258) of TNFR2 (SEQ ID NO:4). TNFRAB2, another antagonistic TNFR2 antibody, binds the epitope containing residues 137-144 (CAPLRKCR; SEQ ID NO:851), as well as epitopes that include one or more residues within positions 80-86 (DSTYTQL; SEQ ID NO:1247), 91-98 (PECLSCGS; SEQ ID NO:1248), and 116-123 (RICTCRPG; SEQ ID NO: 1249) of human TNFR2. TNFR2A3 is a murine antagonistic human TNFR2 antibody that was discovered by immunization of a mouse with human TNFR2 and subsequent CDR mutagenesis, in which the CDR-H3 of the generated precursor antibody was replaced with the CDR-H3 sequence ARDDGSYSPFDYFG (SEQ ID NO:1223). TNFR2A3 binds to two distinct epitopes within human TNFR2; the first epitope includes residues 140-150 of human TNFR2 (LRKCRPGFGVA; SEQ ID NO:1463) and contains the KCRPG motif, and the second epitope is a downstream sequence that contains residues 159-171 of human TNFR2 (VVCKPCAPGTFSN; SEQ ID NO:1464). These data indicate that the CDR-H3 sequence of an antagonistic TNFR2 antibody largely dictates the antigen-binding properties, and that the CDR-H3 motif is a modular domain that can be substituted into anti-TNFR2 antibodies that do not exhibit antagonistic activity, in order to impart such antibodies or antigen-binding fragments thereof with TNFR2 dominant antagonistic features. For example, replacement of the CDR-H3 sequence of a neutral anti-TNFR2 antibody (i.e., an antibody that is neither antagonistic nor agonistic), with the CDR-H3 of an antagonistic TNFR2 antibody, such as the CDR-H3 sequences of TNFRAB1, TNFRAB2 or TNFR2A3, for example, converts the phenotype-neutral antibody to an antagonistic TNFR2 antibody, such as a dominant antagonistic TNFR2 antibody, which is an antagonist that inhibits TNFR2 activation even in the presence of a TNFR2 agonist, such as TNF, or IL-2 (see, e.g., U.S. Patent Publication No. 2019/0144556).

[0821] TNFR2 antagonist antibodies or antigen-binding fragments thereof can contain the CDR-H1 sequences set forth in any of SEQ ID NOs: 1214, 1215, and 1231-1233; the CDR-H2 sequences set forth in any of SEQ ID NOs: 1216, 1224, and 1230; the CDR-H3 sequences set forth in any of SEQ ID NOs: 1217, 1223, and 1225-1229, or the CDR-H3 of TNFRAB1, corresponding to residues 99-112 of SEQ ID NO:1212; the CDR-L1 sequences set forth in any of SEQ ID NOs: 1218 and 1234-1236, or the CDR-L1 sequence of TNFRAB1, corresponding to residues 24-33 of SEQ ID NO:1213; the CDR-L2 sequences set forth in any of SEQ ID NOs: 1219, 1220, 1237 and 1238, or the CDR-L2 sequence of TNFRAB1, corresponding to residues 49-55 of SEQ ID NO:1213; or the CDR-L3 sequences set forth in any of SEQ ID NOs: 1221, 1222, and 1241-1244, or the CDR-L3 sequence of TNFRAB1, corresponding to residues 88-96 of SEQ ID NO:1213. Exemplary framework regions that can be used for the development of a humanized anti-TNFR2 antibody, containing one or more of the above CDRs include, without limitation, those described in U.S. Pat. Nos. 7,732,578 and 8,093,068, and in International Application Publication No. WO 2003/105782. Another approach to engineering humanized anti-TNFR2 antagonistic antibodies is to align the sequences of the heavy chain variable region and light chain variable region of an antagonistic TNFR2 antibody, such as TNFRAB1, TNFRAB2, or TNFR2A3, with the heavy chain variable region and light chain variable region of a consensus human antibody. Consensus human antibody heavy chain and light chain sequences are known in the art (see e.g., the “VBASE” human germline sequence database; see also Kabat, et al., Sequences of Proteins of Immunological Interest, Fifth Edition, U.S. Department of Health and Human Services, NIH Publication No. 91-3242, (1991); Tomlinson et al., (1992) J. Mol. Biol. 227:776-798; and Cox et al., (1994) Eur. J. Immunol. 24:827-836). In this way, the variable domain framework residues and CDRs can be identified by sequence alignment. One can substitute, for example, the CDR-H3 of the consensus human antibody with the CDR-H3 of an antagonistic TNFR2 antibody, such as the CDR-H3 of TNFRAB1, TNFRAB2, or TNFR2A3, to produce a humanized TNFR2 antagonist antibody. Exemplary variable domains of a consensus human antibody include the heavy chain variable domain set forth in SEQ ID NO:1245, and the light chain variable domain set forth in SEQ ID NO:1246, identified in U.S. Pat. No. 6,054,297 (see, e.g., U.S. Patent Publication No. 2019/0144556). The CDR-H1 and CDR-H2 sequences of the exemplary consensus sequence of a human antibody heavy chain variable domain of SEQ ID NO:1245 can be replaced, for example, with the corresponding CDR sequences of a phenotype-neutral, TNFR2-specific antibody, and the CDR-L1, CDR-L2 and CDR-L3 sequences of the exemplary consensus sequence of a human antibody light chain variable domain of SEQ ID NO:1246 can be replaced with the corresponding CDR sequences of a phenotype-neutral, TNFR2-specific antibody, to produce humanized, antagonistic TNFR2 antibodies.

[0822] Other TNFR2 antagonists can be identified by screening for peptides that bind epitopes within TNFR2, such as those set forth in any one of SEQ ID NOs:1247-1464, by using techniques known in the art, for example, phage display, bacterial display, yeast display, mammalian display, ribosome display, mRNA display, and cDNA display, or any other methods known in the art, such as those described in U.S. Patent Publication No. 2019/0144556.

[0823] A human TNFR2 antagonist mAb, when added to standard Treg expansion culture conditions, inhibits the expansion of Tregs and reduces their suppressive activity (see, e.g., Zou et al. (2018) Front. Immunol. 9:594). Two potent, dominant anti-human TNFR2 antagonistic antibodies that outcompete TNF (the natural agonist of TNFR2), inhibit TNF-induced in vitro expansion of human Tregs, and can induce the death of Tregs in vitro. The TNFR2 antagonists bind TNFR2 specifically through the F(ab) region, independently of the Fc region or the crosslinking of antibodies, and block the binding of TNF to TNFR2 by binding to the antiparallel dimers of TNFR2. As a result, TNF-induced activation of NF-κB pathways in Tregs is inhibited, and conversion of transmembrane TNFR2 (tmTNFR2) to soluble TNFR2 (sTNFR2) is suppressed. Tregs isolated from ovarian cancer tissues were found to be more sensitive to TNFR2 antagonist mAb-induced cell death, due to higher levels of TNFR2 expression on tumor-infiltrating Tregs. The TNFR2 antagonists also induced the death of TNFR2⁺ OVCAR3 (ovarian cancer) tumor cells, which also express TNFR2. These results indicate the therapeutic potential for TNFR2 antagonists in the treatment of tumors, by targeting tumor-infiltrating Tregs as well as tumor cells (see, e.g., Zou et al. (2018) Front. Immunol. 9:594; Torrey et al. (2017) Sci. Signal. 10:eaaf8608).

[0824] In addition to anti-TNFR2 antagonistic mAbs, small molecules can inhibit TNFR2. For example, thalidomide is a small molecule synthetic glutamic acid derivative with immunomodulatory and anti-inflammatory properties; thalidomide and its structural analogs, lenalidomide and pomalidomide, are classified as immunomodulatory drugs. Thalidomide and its analogs inhibit TNF synthesis by downregulating NF-κB, destroying TNF mRNA, and targeting reactive oxygen species and α1-acid glycoprotein, and also, inhibit surface expression of TNFR2 on T cells by inhibiting intracellular TNFR2 transport to the cell surface. It has been shown that thalidomide reduces the number and function of Tregs in patients with chronic lymphocytic leukemia, and, in patients with acute myeloid leukemia, combination therapy with lenalidomide and azacitidine downregulates TNFR2 expression on CD4⁺ T cells and reduces the number of TNFR2⁺ Tregs, enhancing effector immune function. In patients with multiple myeloma, however, treatment with thalidomide and its analogs increased the number of Tregs, likely due to the elevated serum levels of TNF following treatment, indicating that the effects of thalidomide on TNFR2⁺ Tregs is disease specific (see, e.g., Zou et al. (2018) Front. Immunol. 9:594).

[0825] Another small molecule inhibitor of TNFR2 is panobinostat, a histone deacetylase inhibitor that can reduce FoxP3 expression and inhibit the suppressive activity of Tregs. Combination therapy with panobinostat and azacitidine reduces the numbers of TNFR2⁺ Tregs in the blood and bone marrow of patients with acute myeloid leukemia, and the resulting increase in IFNγ and IL-2 production by effector T cells results in a therapeutic effect in these patients (see, e.g., Zou et al. (2018) Front. Immunol. 9:594). Cyclophosphamide, a DNA alkylating agent commonly used as a cytotoxic chemotherapeutic in cancer treatment, can inhibit immunosuppressive function of Tregs at low doses, and depletes the maximally suppressive Tregs in mice bearing PROb colon cancer following the administration of a single dose, resulting in the activation of anti-tumor immune responses. In a mouse model of mesothelioma, cyclophosphamide treatment depleted TNFR2^{hi} Tregs. The combination of cyclophosphamide with etanercept inhibited the growth of established CT26 tumors in mice, by blocking TNF-TNFR2 interaction and eliminating TNFR2-expressing Treg activity (see, e.g., Zou et al. (2018) Front. Immunol. 9:594). Triptolide, an immunosuppressive molecule isolated from the Chinese herb Tripterygium wilfordii, inhibits TNF and TNFR2 expression in the colon of a mouse colitis model, and also, decreases the number of Tregs and inhibits tumor growth in mice with melanoma (see, e.g., Zou et al. (2018) Front. Immunol. 9:594).

### F. SELECTIVE TARGETING OF THE TNFR1 AND/OR TNFR2 AXIS

[0826] As described herein, existing anti-TNF therapies, which block TNF and inhibit its signaling via TNFR1 and TNFR2, are limited in therapeutic efficacy, tolerability, and safety. Anti-TNF therapies ameliorate RA and other autoimmune and inflammatory diseases and conditions by preventing TNF signaling through TNFR1, and abrogating apoptotic and inflammatory pathways. These anti-TNF therapies, however, also block the beneficial effects of TNFR2 signaling, including the protective, pro-survival, regeneration-promoting and anti-inflammatory signaling pathways, as well as the TNFR2-associated expansion of immunosuppressive Tregs, resulting in serious, sometimes fatal, side effects, including serious infections. Other side effects associated with the use of TNF blocking therapies include congestive heart failure, liver injury, demyelinating disease/CNS disorders, lupus, psoriasis, sarcoidosis, and an increased susceptibility to the development of additional autoimmune diseases, as well as cancers, including lymphomas and solid malignancies. Anti-TNF therapies have failed in the treatment of demyelinating and neurodegenerative diseases, and can exacerbate disease symptoms.

[0827] Provided herein are constructs, including TNFR1 antagonist constructs, TNFR2 agonist constructs, multi-specific, such as bi-specific, TNFR1 antagonist/TNFR2 agonist constructs, and nucleic acids and methods for the selective inhibition of TNF signaling via TNFR1 (see, e.g., FIG. 2, which depicts an exemplary bi-specific construct). Also provided are constructs and methods for selective inhibition of TNF signaling via TNFR1, including while maintaining or enhancing TNFR2 signaling. These constructs and methods provide improved therapeutic approaches for the treatment of diseases and disorders of the TNF/TNFR1 axis. These therapeutic approaches include, but are not limited to treatments of autoimmune, chronic inflammatory, neurodegenerative, and demyelinating, diseases, disorders and conditions, and cancer, which also has an inflammatory component. As described herein, concomitant or sequential selective agonism of TNFR2 with TNFR1 antagonism has therapeutic effects, and can enhance the therapeutic index of selective TNFR1 antagonists, by activating desirable signaling pathways, such as anti-inflammatory pathways and NF-κB pathways that control cell survival and proliferation, and by inducing the expansion of immunosuppressive Tregs that remove excess autoreactive/effector T cells that result in tissue destruction, from the autoimmune microenvironment.

[0828] Sections 1 and 2 describe methods that target each of TNFR1 and TNFR2; section 3 provides an overview of constructs provided herein that solve the problems of prior approaches, particularly those that targeted TNFR1; and Section 4 describes the structure and components of constructs provided herein.

[0829] 1. Selective Blockade of TNFR1 with TNFR1 Antagonists

[0830] The use of multivalent agents, such as antibodies against TNFR1, however, is not feasible. The TNF trimer binds to three TNFR1 chains as a preligand assembly complex, mediated by the preligand assembly domains (plads) of each monomeric TNFR. This differs from most receptor systems where ligand binding is required before clusters form on the surface of the cell. The TNF receptors are single transmembrane glycoproteins with about 28% homology mostly in their extracellular domain with both receptors containing four tandemly repeated cysteine rich motifs. Their intracellular sequences are largely unrelated with almost no homology between each other, and early work indicated delineation of their signaling functions (Grell et al. (1994) J. Immol. 153(5):1963-72). They contain several motifs with known functional significance. Each of TNFR1 and TNFR2 contains an extracellular pre-ligand-binding assembly domain (PLAD) domain (distinct from ligand binding regions) that precomplexes receptors. Conformational changes are induced when the trimeric TNF ligand binds to the TNFR trimer in the cell membrane, resulting in signal activation (MacEwan (2002) Br J Pharmacol. 135(4):855-875; and Lo et al. (2019) Sci Signal. 12(592):eaav5637).

[0831] As a result, antibodies and other multivalent agents that bind to TNFR1 likely are not suitable for use as antagonists, because they can cause super-clustering leading to activation of TNFR signaling. Monovalent antagonists, such as single domain antibodies (dAbs or sdAbs), nanobodies (Nbs; camelid single domain antibodies), scFv fragments, and Fab fragments, on the other hand, bind to one TNFR1 molecule, and do not induce cross-linking or clustering of the receptor on cell surfaces, abrogating any activation of TNFR1 signaling. Monovalent antagonists can bind to domain 1, 2, 3 or 4, or to an epitope spanning multiple domains, of the TNFR1 extracellular domain (see, e.g., U.S. Pat. Nos. 9,028,817 and 9,028,822), but these existing antagonists were ineffective therapeutics. Among a variety of problems were the short serum-half-lives, and immunogenicity, and other problems. Selective blockade of TNFR1 can be achieved with TNFR1 antagonists with properties described and provided herein.

[0832] 2. Selective Activation of TNFR2 with TNFR2 Agonists

[0833] As described herein, selective activation of TNFR2 can be achieved using TNFR2-specific agonists, which can include, for example, TNFR2 agonistic antibodies and antigen-binding fragments thereof, and TNFR2-selective TNF muteins and fusion proteins thereof. Antigen-binding fragments of antibodies that bind to the first and/or second epitope of human TNFR2 can be used. The first epitope of TNFR2 includes amino acid residues 48-67 of SEQ ID NO:4, and the second epitope includes position 135 of SEQ ID NO:4, including, for example, residues 128-147, 130-149, 135-147, or 135-153, of SEQ ID NO:4 (see, e.g., International Application Publication No. WO 2014/124134; and U.S. Pat. No. 9,821,010). Other epitopes on TNFR2 have been identified and can be used to design antigen-binding fragments with TNFR2-selectivity, as discussed below.

[0834] In contrast to the antagonism of TNFR1, to agonize TNFR2, dimeric and trimeric molecules are used that mimic the action of membrane-bound TNF, which is the primary ligand that activates TNFR2. As such, TNFR2 agonists include TNFR2-selective TNF muteins and antibody fragments. Exemplary are TNF mutein and antibody fragments that fused with multimerization domains, particularly dimerization or trimerization domains, as discussed below. For extending half-lives of these molecules they can be associated with or coupled to polyethylene glycol with or without cleavable linkers (see, e.g., Santi et al. (2012) Proc. Natl. Acad. Sci. U.S.A. 109:6211-6216), or fused or bound to half-life extender proteins or peptides, such as human serum albumin (with or without FcRn optimization, and with or without itself being PEGylated); and ADCC-inactivated/FcRn optimized Fc domains of antibodies with or without PEGylation (reviewed, for example in Strohl (2015) BioDrugs 29(4):215-239). Half-life extenders, include, for example, PEGylation, modification of glycosylation, sialyation, PASylation (polymers of PAS amino acids about 100-200 residues in length), ELPylation (see, e.g., Floss et al. (2010) J. Trends Biotechnol. 28(1):37-45), Hapylation (glycine homopolymer), fusion to human serum albumin, fusion to GLK, fusion to CTP, GLP fusion, fusion to the constant fragment (Fc) domain of a human immunoglobulin (IgG), fusion to transferrin, fusion to non-structured polypeptides such as XTEN (also referred to as rPEG, genetic fusion of non-exact repeat peptide sequence, containing A, E, G, P, S, and T, see, e.g., Schellenberger et al. (2009) Nat Biotechnol. 27(12):1186-90), and other such modifications and fusions that increase size, increase hydrodynamic radius, alter charge, or target to receptors for recycling rather than clearance, and combinations of such modifications. Particular examples of extenders of half-life are discussed and exemplified in detail below.

[0835] 3. TNFR1 Antagonist Constructs, TNFR2 Agonist Constructs; Multi-Specific, Including Bi-Specific, TNFR1 Antagonist and TNFR2 Agonist Constructs

[0836] Thus, provided herein are constructs for inhibiting TNFR1 signaling/activity and/or for agonizing TNFR2. Included among the constructs provided herein are constructs, discussed below, that are multi-specific, such as bi-specific that inhibit TNFR1 signaling and agonize TNFR2. Care is taken in designing these constructs, since bispecific antagonists TNFR1 or TNFR2 can inhibit the ability of TNF to induce activating changes in conformation of the resting trimeric TNFR, thus preventing its signaling. Other multimeric molecules risk the aggregation of receptors, thus forcing the TNFR to signal for cellular inflammation and apoptosis. Multi-specific constructs herein generally target different receptors, such as each of TNFR1 and TNFR2. By inhibiting TNFR1 signaling, and advantageously agonizing TNFR2 activity, this provides improved treatments of diseases, conditions, and disorders in which TNF is involved.

[0837] Among the constructs provided herein are TNFR1 antagonist constructs. These include fusion protein constructs, such as TNFR1 antagonist-Fc fusion constructs. As described herein, and exemplified in the Examples, TNFR1 antagonists that specifically target TNFR1, without antagonizing or without substantially antagonizing TNFR2, or that include or exhibit TNFR2 agonist activity can be selected, generated, or designed. The TNFR1 antagonist constructs improve the therapeutic efficacy and safety of prior TNFR1 antagonists, including monovalent antagonists, such as the dAbs, scFvs and Fabs.

[0838] Also provided are selective TNFR2 agonist constructs, such as TNFR2-Fc fusion constructs that improve the therapeutic efficacy of prior TNFR2 agonists. For example, as shown herein, the half-life of the Fc fusion constructs increases the half-life of prior TNFR1 antagonists or TNFR2 agonists, which, for example, reduces the frequency of dosing, improves patient compliance, and improves the therapeutic index. Also provided are selective TNFR2 agonist constructs, such as TNFR2-Fc fusion constructs that improve the therapeutic efficacy of prior TNFR2 agonists. For example, as shown herein, the half-life of the Fc fusion constructs increases the half-life of prior TNFR1 antagonists or TNFR2 agonists, which, for example, reduces the frequency of dosing, improves patient compliance, and improves the therapeutic index. Alternative candidate half-life extenders including PEGylating and fusion to peptides, are discussed above, and exemplary extenders are detailed below (reviewed in, Strohl (2015) BioDrugs 29(4):215-239, see also, Tan et al. (2018) Current Pharmaceutical Design 24:4932-4946), but also includes PEGylation using linear or branched PEG (see, e.g., Swierczewska et al. (2015) Expert Opin Emerg Drugs 20(4):531-536).

[0839] The TNFR1 antagonist constructs include an optional linker and an optional activity modifier. They can be assembled in any order. The structure of TNFR1 antagonist constructs can be represented by the formulae 1:

(TNFR1 inhibitor)ₙ-linkerₚ-(activity modifier)_{q}, formula 1a, or

(activity modifier)_{q}-linkerₚ-(TNFR1 inhibitor)ₙ, formula 1b, where:

each of n and q is an integer, and each is independently 1, 2, or 3; p is 0, 1, 2 or 3; and an activity modifier is a moiety, such as a polypeptide, such as albumin, or an Fc that is modified to have reduced or no ADCC activity, that increases serum half-life of the TNFR1 inhibitor; and the TNFR1 inhibitor is a molecule, such as a polypeptide or small drug molecule that binds to TNFR1 and inhibits its activity. The activity modifier is not a human serum albumin antibody or an unmodified Fc. Also provided are the TNFR2 agonists of formula 3: (TNFR2 agonist)ₙ-linkerₚ-(activity modifier)_{q}, where n, p and q, the linker, and the activity modifier, are as set forth for formula 1.

[0840] Also provided are multi-specific, including bi-specific, constructs that contain an TNFR1 antagonist (a TNFR1 inhibitor) and an TNFR2 agonist, linked directly or via a linker. Such constructs can include a TNFR1 antagonist of the above formula or can have a structure as set forth in formula 2 below. The bi-specific and multi-specific constructs selectively inhibit inflammatory and deleterious TNFR1 signaling, enhance protective and anti-inflammatory TNFR2 signaling. They include moieties that provide for advantageous pharmacokinetic properties, including increased serum half-life and stability, and reduced peripheral clearance, compared with prior TNFR1 antagonists and TNFR2 agonists.

[0841] The structure of the multi-specific, such as, bi-specific, molecules/constructs provided herein is represented by the following formula (Formula 2):

(TNFR1 inhibitor)ₙ-(activity modifier)ᵣ₁-Linker (L)ₚ-(activity modifier)ᵣ₂-(TNFR2 agonist)_{q},

where n=1, 2, or 3, p=1, 2, or 3, r1 and r2 each independently=0, 1, 2, and q=0, 1 or 2.

[0842] As with formulae 1, the order of components can vary. The linker can contain a plurality of components, such as a GS linker, a polymeric moiety, such as a PEG, or other such linker, or a hinge region, or other combinations of components, and the activity modifier is a moiety that modify the activity of the construct, such as an Fc region, or a modified Fc region, or a polypeptide the increases half-life, or resistance to endogenous inhibitors. The components of formulae 1 and 2 can be polypeptides or can contain other molecules, such as small drugs that specifically bind or a chemical linker, or a non-peptidic activity modifier. Examples of each component are described below.

[0843] Also provided are constructs that contain (formulae 5):

(TNFR2 agonist)ₙ-linkerₚ-(activity modifier)_{q}, formula 5a, or

(activity modifier)_{q}-linkerₚ-(TNFR2 agonist)ₙ, formula 5b,

where each component is as defined above in formula 1, and the TNFR2 agonist can be small molecule, or a polypeptide, such as an TNFR2 single chain antibody agonist or portion thereof.

[0844] 4. Components of the TNFR1 Antagonist Constructs, TNFR2 Agonist Constructs, and Multi-Specific, Including Bi-Specific, TNFR1 Antagonist/TNFR2 Agonist Constructs

[0845] Description of and examples of the constructs, and each component of the constructs provided herein are described in the sections below. Exemplary forms of each construct are depicted and described by formulae 1 and 2, above, and 3 and 4, below.

[0846] a. TNFR1 Inhibitor Moiety (TNFR1 Antagonist)

[0847] The TNFR1 inhibitor moiety in formula 1, above, and in the multi-specific molecules/constructs (formula 2, above) provided herein is any molecule, including a polypeptide or small molecule, that inhibits TNFR1 signaling. This includes a TNFR1 inhibitor that selectively inhibits TNFR1 signaling, without inhibiting TNFR2 signaling.

[0848] In order to avoid receptor clustering, which agonizes TNFR1, the TNFR1 antagonist construct generally is monomeric/monovalent. The TNFR1 antagonist inhibitor component of the construct can be one that is known to have TNFR1 antagonist activity, or can be identified, such as by selecting from a library, such as a phage library, an antibody library, or an aptamer library. Among the TNFR1 inhibitor moieties are those that are modified or selected to have increased specificity or affinity for TNFR1, and, have no or little (such that the adverse side effects from such activity are less than grade 2, and generally grade 1 or less based on the NCI Common Terminology Criteria for Adverse Events (CTCAE) grading system) agonist activity for TNFR1, and optionally also have agonist activity for TNFR2. In those instances, the TNFR1 inhibitor moiety can be provided as a single chain antibody or in any of the other forms described herein, including, such as linked to a half-life extender, such as any described above and below, such as a modified Fc region or Fc dimer, or to another moiety or moieties that increase(s) serum half-life.

[0849] For example, as provided herein, the TNFR1 inhibitor component of the TNFR1 antagonist construct can be or can include a human domain antibody (dAb) that specifically binds to TNFR1. The dAb can contain a variable-region heavy chain (V_{H}) or light chain (V_{L}) domain. dAbs for use herein include, for example, dAbs designated DOM1h-574-208 (SEQ ID NO:54) (from DMS5541; see, SEQ ID NO:38), GSK1995057 (see, SEQ ID NO:55) and GSK2862277 (see, SEQ ID NO:56), as well as the dAbs set forth in any of SEQ ID NOs: 57-672 (see, e.g.: U.S. Pat. Nos. 9,028,817 and 9,028,822; U.S. Publication Nos.: 2006/0083747, 2010/0034831, and 2012/0107330; and International Application Publication Nos.: WO 2004/058820, WO 2004/081026, WO 2005/035572, WO 2006/038027, WO 2007/049017, WO 2008/149144, WO 2008/149148, WO 2010/094720, WO 2011/051217, WO 2011/006914, WO 2012/172070, WO 2012/104322, and WO 2015/104322, and other related family member applications and patents; see, also Enever et al., (2015) Protein Engineering, Design & Selection 28(3):59-66, which provides sequences and discussion of various dAbs). Provided are Vhh dAbs that contain a heavy chain. These dAbs can be linked directly or indirectly to a moiety, such as Fc or HSA, that increases serum half-life, and also that can impart other properties or activities to a construct.

[0850] The anti-TNFR1 inhibitor component can be or include a nanobody. Exemplary of these are (Nbs) Nb 70 and/or Nb 96 (see, SEQ ID NOs: 683 and 684, respectively). These dAbs and Nbs are surveyed for immunogenicity, and, if needed, using molecular modeling and mutagenesis, are modified to remove predicted immunogenic sequences. Immunogenic sequences can be eliminated by standard methods known in the art. For example, identify the potentially antigenic peptides, and make of conservative replacements of each amino acid to identify those that are not antigenic and that retain activity. Other methods are known (see, e.g., Schubert et al. (2018) PLoS Comput Biol. 14(3):e1005983), which describes a method for de-immunizing proteins).

[0851] Thus, for example, the TNFR1 antagonist dAb portion, can be the dAb set forth in any of SEQ ID NOs: 54-672, or a dAb with about or at least about 85%, 90%, 95%, 98%, 99%, or greater, sequence identity to a dAb set forth in any of SEQ ID NOs: 54-672, or a TNFR1 antagonist dAb known to those of skill in the art.

[0852] Other TNFR1 antagonists include, for example, antigen-binding antibody fragments. For example, the TNFR1 antagonist can be a Fab fragment, Fab′ fragment, single-chain Fv (scFv), disulfide-linked Fv (dsFv), Fd fragment, Fd′ fragment, single-chain Fab (scFab), hsFv (helix-stabilized Fv), a free light chain, or antigen-binding fragments of any of the above. It also can include linkers, such as GS linkers within the construct, for example, to increase flexibility.

[0853] For example, the TNFR1 inhibitor portion of the antagonist can contain antigen-binding fragments from the TNFR1 antagonistic antibody designated ATROSAB. The fragments include one or more (or all) of the heavy chain or light chain CDRs of ATROSAB, or CDRs that exhibits at least 85%, 90%, 95% or more sequence identity thereto (e. g., 85%, 90%, 95%, 96%, 97%, 98%, 99% or more sequence identity). The TNFR1 antagonist can contain the V_{H} (residues 1-115 of SEQ ID NO:31) and/or V_{L} (residues 1-113 of SEQ ID NO:32) of ATROSAB, or a V_{H} or V_{L} containing at least 85%, 90%, 95%, or more, sequence identity to the V_{H} or V_{L} of ATROSAB. For example, it can contain a dAb derived from ATROSAB. The TNFR1 antagonist can contain other monovalent antibody fragments of ATROSAB, including, for example, Fab or scFv fragments, such as the ATROSAB Fab (FabATR) light and heavy chains set forth in SEQ ID NOs: 679 and 680, respectively, or the ATROSAB scFv (scFv IZI06.1) set forth in SEQ ID NO:673. For example, the scFv contains the V_{H} domain, corresponding to residues 1-115 of the ATROSAB heavy chain (see, SEQ ID NO:31), linked by a short peptide linker (e.g., GGGGSGGGGSGGSAQ, as in SEQ ID NO:673, or a linker set forth in any of SEQ ID NOs:813-834) to the V_{L} domain, corresponding to residues 1-113 of the ATROSAB light chain (see, SEQ ID NO:32). The TNFR1 antagonist can contain variants of the ATROSAB scFV with increased affinity or selectivity or both for TNFR1, including scFv IG11, which includes or has the sequence set forth in SEQ ID NO:674, scFv T12B, containing the sequence set forth in SEQ ID NO:675, or scFv 13.7, containing the sequence set forth in SEQ ID NO:676, or variants containing at least 90% sequence identity to the sequences of scFv IG11, scFv T12B, and scFv 13.7. The TNFR1 antagonist also can include the sequence of amino acid residues from the Fab 13.7 light and heavy chains (derived from scFV 13.7), as set forth in SEQ ID NOs: 681 and 682, respectively.

[0854] TNFR1 inhibitors in the TNFR1 antagonist construct also include TNF variants (muteins) that bind to TNFR1 to reduce or inhibit signaling. These include, for example, TNF variants (muteins), such as, but not limited to, TNF variants containing one or more of the mutations L29S, L29G, L29Y, R31E, R31N, R32Y, R32W, S86T, L29S/R32W, L29S/S86T, R32W/S86T, L29S/R32W/S86T, R31N/R32T, R31E/S86T, R31N/R32T/S86T, and E146R, with reference to SEQ ID NO:2, which impart selectivity to TNFR1. The TNFR1 antagonist can contain, for example, the TNFR1-selective antagonistic TNF mutein derived from the mutein designated XPro1595 (see, SEQ ID NO:701). XPro1595 contains the mutations V1M, R31C, C69V, Y87H, C101A and A1456R, with reference to SEQ ID NO:2. Other exemplary TNFR1-selective antagonistic TNF muteins are derived from XENP345 (see, SEQ ID NO:702), which contains the mutations I97T/A145R, with reference to SEQ ID NO:2; and the TNFR1-selective antagonistic TNF mutein designated R1antTNF (see, SEQ ID NO:703), which contains the mutations A84S, V85T, S86T, Y87H, Q88N and T89Q, with reference to SEQ ID NO:2. TNFR1 inhibitors to be used in the TNFR1 antagonists also include small molecule inhibitors that can be chemically conjugated to a linker.

[0855] As described herein, see e.g., the Examples, the TNFR1 inhibitor (antagonist) moiety can be modified to improve its specificity/selectivity for TNFR1, and also, optionally can be modified to have TNFR2 agonist activity. TNF binds to TNFR1 with low pM affinity (K_{d} 19 pM); in general the antagonists herein have at least the same affinity as TNF, unless its activity is due to ‘locking’ the receptor in an inactive conformation, then it is not necessary since the receptors become locked. TNFR1 antagonist constructs provided herein, include those that specifically bind to TNFR1 with a K_{D} value of less than or less than about 100 nM (e.g., less than or equal to: 95 nM, 90 nM, 85 nM, 80 nM, 75 nM, 70 nM, 65 nM, 60 nM, 55 nM, 50 nM, 45 nM, 40 nM, 35 nM, 30 nM, 25 nM, 20 nM, 15 nM, 10 nM, 5 nM, 4 nM, 3 nM, 2 nM, or 1 nM). In certain embodiments, the TNFR1 antagonists specifically bind to TNFR1 with a K_{D} value of less than 1 nM (e.g., less than or equal to: 990 pM, 980 pM, 970 pM, 960 pM, 950 pM, 940 pM, 930 pM, 920 pM, 910 pM, 900 pM, 890 pM, 880 pM, 870 pM, 860 pM, 850 pM, 840 pM, 830 pM, 820 pM, 810 pM, 800 pM, 790 pM, 780 pM, 770 pM, 760 pM, 750 pM, 740 pM, 730 pM, 720 pM, 710 pM, 700 pM, 690 pM, 680 pM, 670 pM, 660 pM, 650 pM, 640 pM, 630 pM, 620 pM, 610 pM, 600 pM, 590 pM, 580 pM, 570 pM, 560 pM, 550 pM, 540 pM, 530 pM, 520 pM, 510 pM, 500 pM, 490 pM, 480 pM, 470 pM, 460 pM, 450 pM, 440 pM, 430 pM, 420 pM, 410 pM, 400 pM, 390 pM, 380 pM, 370 pM, 360 pM, 350 pM, 340 pM, 330 pM, 320 pM, 310 pM, 300 pM, 290 pM, 280 pM, 270 pM, 260 pM, 250 pM, 240 pM, 230 pM, 220 pM, 210 pM, 200 pM, 190 pM, 180 pM, 170 pM, 160 pM, 150 pM, 140 pM, 130 pM, 120 pM, 110 pM, 100 pM, 90 pM, 80 pM, 70 pM, 60 pM, 50 pM, 40 pM, 30 pM, 20 pM, 10 pM, 5 pM, or 1 pM).

[0856] The TNFR1 antagonist constructs provided herein also are selected or designed so that they lack or have reduced binding for other TNFR superfamily members. For example, they are assessed to identify those that do not specifically bind to another TNFR superfamily member, such as TNFR2, using any suitable in vitro binding assay. Assays include, for example, ELISA-based methods. For example, the TNFR1 antagonist constructs can specifically bind to human TNFR1 or a TNFR1-derived peptide, with an affinity that is greater than the affinity for another family member or corresponding peptide thereof. The increased affinity is, for example, at least or at least about 5-fold greater (e.g., at least or equal to 5-fold greater, 6-fold greater, 7-fold greater, 8-fold greater, 9-fold greater, 10-fold greater, 20-fold greater, 30-fold greater, 40-fold greater, 50-fold greater, 60-fold greater, 70-fold greater, 80-fold greater, 90-fold greater, 100-fold greater, 200-fold greater, 300-fold greater, 400-fold greater, 500-fold greater, 600-fold greater, 700-fold greater, 800-fold greater, 900-fold greater, 1,000-fold greater, 2,000-fold greater, 3,000-fold greater, 4,000-fold greater, 5,000-fold greater, 6,000-fold greater, 7,000-fold greater, 8,000-fold greater, 9,000-fold greater, 10,000-fold greater, or more), than the affinity of the TNFR1 antagonist for another TNFR superfamily member, such as TNFR2.

[0857] Among the TNFR1 antagonist constructs provided herein are those that exhibit high kₒₙ and low k_{off} values upon interaction with TNFR1, consistent with high-affinity receptor binding. For example, the TNFR1 antagonist constructs provided herein can exhibit kₒₙ values in the presence of TNFR1 of greater than or equal to, or greater than, about 10⁴ M⁻¹s⁻¹ (e.g., greater than or equal to 1.0×10⁴ M⁻¹s⁻¹, 1.5×10⁴ M⁻¹s⁻¹, 2.0×10⁴ M⁻¹s⁻¹, 2.5×10⁴ M⁻¹s⁻¹, 3.0×10⁴M⁻¹s⁻¹, 3.5×10⁴ M⁻¹s⁻¹, 4.0×10⁴ M⁻¹s⁻¹, 4.5×10⁴ M⁻¹s⁻¹, 5.0×10⁴ M⁻¹s⁻¹, 5.5×10⁴ M⁻¹s⁻¹, 6.0×10⁴ M⁻¹s⁻¹, 6.5×10⁴ M⁻¹s⁻¹, 7.0×10⁴ M⁻¹s⁻¹, 7.5×10⁴ M⁻¹s⁻¹, 8.0×10⁴ M⁻¹s⁻¹, 8.5×10⁴ M⁻¹s⁻¹, 9.0×10⁴ M⁻¹s⁻¹, 9.5×10⁴ M⁻¹s⁻¹, 1.0×10⁵ M⁻¹s⁻¹, 1.5×10⁵ M⁻¹s⁻¹, 2.0×10⁵ M⁻¹s⁻¹, 2.5×10⁵ M⁻¹s⁻¹, 3.0×10⁵ M⁻¹s⁻¹, 3.5×10⁵ M⁻¹s⁻¹, 4.0×10⁵ M⁻¹s⁻¹, 4.5×10⁵ M⁻¹s⁻¹, 5.0×10⁵ M⁻¹s⁻¹, 5.5×10⁵ M⁻¹s⁻¹, 6.0×10⁵ M⁻¹s⁻¹, 6.5×10⁵ M⁻¹s⁻¹, 7.0×10⁵ M⁻¹s⁻¹, 7.5×10⁵ M⁻¹s⁻¹, 8.0×10⁵ M⁻¹s⁻¹, 8.5×10⁵ M⁻¹s⁻¹, 9.0×10⁵ M⁻¹s⁻¹, 9.5×10⁵ M⁻¹s⁻¹, 1.0×10⁶ M⁻¹s⁻¹). For example, the TNFR1 antagonists provided herein can exhibit k_{off} values, when complexed to TNFR1, of less than or equal to, or less than about 10⁻³ s⁻¹ (e.g., less than or less than about 1.0×10⁻³s⁻¹, 9.5×10⁻⁴ s⁻¹, 9.0×10⁻⁴ s⁻¹, 8.5×10⁻⁴s⁻¹, 8.0×10⁻⁴ s⁻¹, 7.5×10⁻⁴ s⁻¹, 7.0×10⁻⁴ s⁻¹, 6.5×10⁻⁴ s⁻¹, 6.0×10⁻⁴ s⁻¹, 5.5×10⁻⁴ s⁻¹, 5.0×10⁻⁴ s⁻¹, 4.5×10⁻⁴ s⁻¹, 4.0×10⁻⁴s⁻¹, 3.5×10⁻⁴ s⁻¹, 3.0×10⁻⁴ s⁻¹, 2.5×10⁻⁴ s⁻¹, 2.0×10⁻⁴ s⁻¹, 1.5×10⁻⁴ s⁻¹, 1.0×10⁻⁴ s⁻¹, 9.5×10⁻⁵ s⁻¹, 9.0×10⁻⁵ s⁻¹, 8.5×10⁻⁵ s⁻¹, 8.0×10⁻⁵ s⁻¹, 7.5×10⁻⁵ s⁻¹, 7.0×10⁻⁵ s⁻¹, 6.5×10⁻⁵ s⁻¹, 6.0×10⁻⁵ s⁻¹, 5.5×10⁻⁵ s⁻¹, 5.0×10⁻⁵ s⁻¹, 4.5×10⁻⁵ s⁻¹, 4.0×10⁻⁵ s⁻¹, 3.5×10⁻⁵ s⁻¹, 3.0×10⁻⁵ s⁻¹, 2.5×10⁻⁵ s⁻¹, 2.0×10⁻⁵ s⁻¹, 1.5×10⁻⁵ s⁻¹ or 1.0×10⁻⁵ s⁻¹).

[0858] The C-terminus of the TNFR1 antagonist (TNFR1 inhibitor portion of the construct of formula 1 and also formula 2), such as any of the TNFR1 antagonist constructs described herein, can be linked, directly, or more generally via a linker or combination of linker elements, to an activity modifier, or fused with the N-terminus of an TNFR2 agonist (or to a small molecule TNFR2 agonist) via one or more linkers, as discussed below and elsewhere herein. Alternatively, the N-terminus of the TNFR1 inhibitor moiety can be fused to the C-terminus of the TNFR2 agonist, or the C-terminus of the TNFR1 inhibitor moiety (or to a small molecule TNFR2 agonist) can be fused directly or via linker to the activity modifier or to a linker.

[0859] The linkers (L), discussed in more detail below, are any that improve pharmacological properties, including increasing stability and flexibility and decreasing steric hindrance, and optionally conferring additional properties on the constructs. The linkers can include more than one component, where each component confers a particular property, For example, the TNFR1 antagonists can include any one or more of an Ig Fc region, and/or an antibody hinge region, and/or a short peptide linker, such as a glycine-serine linker. The Fc regions are modified, for example, to eliminate or reduce ADCC activity, and/or to alter receptor binding, and/or for other such activities and properties. Linkers, as discussed below, also include chemical linkers. For example, in some embodiments, the linker is a poly(ethylene glycol) (PEG) molecule, or a branched PEG molecule, such as those whose molecular mass is at or about 30 kDa or more.

[0860] b. TNFR2 Agonist Constructs and TNFR2 Antagonist Constructs

[0861] TNFR2 agonist (regulatory T cell generator) constructs can be used for treating, among other diseases, disorders, and conditions, inflammation and autoimmune diseases, and also solid tumors. Regulatory T cells (Tregs) suppress autoimmunity, and have an immunosuppressive effect, such as in a tumor microenvironment. The proliferation of Tregs is positively regulated by TNFR2, and the absence of TNFR2 correlates with reduced Treg numbers and worsened experimental arthritis. A TNFR2 agonist construct, thus, can be used for the treatment of many autoimmune diseases, other chronic inflammation, and other acute inflammatory conditions (e.g., SARS, COVID-19).

[0862] TNFR2 antagonist constructs suppress regulatory T cells and are used for the treatment of cancer and other hyperproliferative diseases (TNFR2 is a ‘checkpoint receptor’). Regulatory T cells accumulate in the tumor microenvironment and are responsible for suppressing the anti-tumor immune response. The TNFR2 antagonist constructs are for treatment of cancers and other hyperproliferative diseases, such as Dupuytren's Contracture, and idiopathic lung fibrosis.

[0863] As discussed above, also are provided are TNFR2 agonist constructs containing the TNFR2 agonists. These include TNFR2 agonists linked directly or via a linker to an activity modifier, and also include multi-specific constructs, such as bi-specific constructs that contain a TNFR1 antagonist and a TNFR2 agonist in various configurations with linkers with appropriate structures and properties. In some embodiments, the TNFR2 agonists are in bi-specific constructs. The TNFR2 agonist, particularly in the multi-specific, such as bi-specific, molecules/constructs provided herein selectively activates, or agonizes, TNFR2, without activating or without substantially activating TNFR1 and/or without interfering with the inhibition of TNFR1 signaling via the TNFR1 antagonist portion of the multi-specific, such as bi-specific, molecule.

[0864] The TNFR2 agonist can be any known to those of skill in the art, including agonist antibodies and antigen-binding portions thereof and single chain and other configuration derivatives of antibodies, and also can be small molecule agonists. TNFR2 agonists also can be produced, such as by in silico design, and/or by preparing candidates and screening a library. For example, a phage library, or an antibody library, or an aptamer library can be screened to identify TNFR2 agonists. TNFR2 agonist antibodies, or antigen-binding fragments thereof can be produced by screening libraries of antibodies and antigen-binding fragments thereof for functional molecules that bind to epitopes within TNFR2 and that selectively promote receptor activation. Exemplary of such methods and molecules are those described in International Application Publication No. WO 2017/040312.

[0865] Development of TNFR2-selective agonists can include the elucidation of epitopes within TNFR2 that promote agonistic receptor-binding. Epitope mapping analysis using linear peptides, and constrained cyclic and bicyclic peptides, derived from various regions of TNFR2, indicates that agonistic TNFR2 antibodies bind to epitopes from distinct regions of the TNFR2 polypeptide in a conformation-dependent manner. For example, one identified epitope of TNFR2 includes residues 56-60 (KCSPG) of SEQ ID NO:4. The agonistic TNFR2 antibody MR2-1 binds to this epitope; it does not bind an epitope containing residues 142-146 (KCRPG) of SEQ ID NO:4. Human TNFR2 can be selected to bind to an epitope (such as including residues 56-60 of SEQ ID NO:4). In general, a human TNFR2 agonist can be selected or designed to bind to an epitope within human TNFR2 that contains at least five discontinuous or continuous residues within residues 96-154 of SEQ ID NO:4 (CGSRCSSDQVETQACTREQNRICTCRPGWYCALSKQEGCRLCAPLRKCRPGF GVARPGT; SEQ ID NO:841), and/or can bind an epitope within residues 111-150 of SEQ ID NO:4 (TREQNRICTCRPGWYCALSKQEGCRLCAPLRKCRPGFGVA; SEQ ID NO:842), to which MR2-1 additionally binds. The human TNFR2 agonist also can bind an epitope within residues 115-142 of SEQ ID NO:4 (NRICTCRPGWYCALSKQEGCRLCAPLRK; SEQ ID NO:843), and/or residues 122-136 of SEQ ID NO:4 (PGWYCALSKQEGCRL; SEQ ID NO:844), and/or residues 96-122 of SEQ ID NO:4 (CGSRCSSDQVETQACTR; SEQ ID NO:845), and/or an epitope within residues 101-107 of SEQ ID NO:4 (SSDQVET; SEQ ID NO:846; to which MR2-1 additionally binds), and/or an epitope within amino acids 48-67 of SEQ ID NO:4 (QTAQMCCSKCSPGQHAKVFC; SEQ ID NO:847), and/or an epitope containing residues 130-149 of SEQ ID NO:4 (KQEGCRLCAPLRKCRPGFGV; SEQ ID NO:848), and/or residues 110-147 of SEQ ID NO:4 (CTREQNRICTCRPGWYCALSKQEGCRLCAPLRKCRPGF; SEQ ID NO:849), and/or an epitope containing at least five continuous or discontinuous residues from positions 106-155 of SEQ ID NO:4 (ETQACTREQNRICTCRPGWYCALSKQEGCRLCAPLRKCRPGFGVARPGTE; SEQ ID NO:850), and/or residues 137-144 of SEQ ID NO:4 (CAPLRKCR; SEQ ID NO:851), and/or residues 141-149 of SEQ ID NO:4 (RKCRPGFGV; SEQ ID NO:852).

[0866] In another aspect, the TNFR2 agonist antibody and antigen-binding fragments thereof specifically bind to an epitope within, or containing the amino acid residues, of any one of SEQ ID NOs: 853-1211, whereby the antibody or antigen-binding fragment specifically binds human TNFR2, but does not specifically bind another TNFR superfamily member, particularly TNFR1. The human TNFR2 agonist antibody or antigen-binding fragment thereof does not bind, or has impaired/reduced binding to other members of the TNFR superfamily, including TNFR1 (see, e.g., International Application Publication No. WO 2017/040312).

[0867] Epitopes within TNFR2 that can be used to screen for TNFR2 agonists include the peptides whose sequences are set forth in any of SEQ ID NOs: 853-1211. These peptides can be converted into cyclic and polycyclic formats (for example, by incorporating cysteine residues into the N- and C-terminal positions, or at various internal positions within the peptide chain), in order to confine the peptide fragments to distinct three-dimensional conformations, mimicking the structurally rigidified framework of TNFR2 and the conformational constraint of peptide fragments within TNFR2. The cyclic and polycyclic peptide fragments can then be immobilized on a solid surface and screened for molecules that bind, for example, the TNFR2 agonistic antibody MR2-1, using ELISA. Using this assay, peptides that contain residues within epitopes of TNFR2 that promote receptor activation can structurally pre-organize these amino acids such that they resemble the conformations of the corresponding peptide in the native protein. Cyclic and polycyclic peptides thus obtained (e.g., peptides having the sequence of any one of SEQ ID NOs: 853-1194, and particularly, those that contain the KCSPG motif, as in SEQ ID NOs: 905, 921, 927, 970, and 1085) can be used to screen libraries of antibodies and antigen-binding fragments thereof in order to identify TNFR2 agonists for use herein. The constrained peptides act as surrogates for epitopes within TNFR2 that promote receptor activation, and thus, antibodies or antigen-binding fragments generated using this screening technique bind to the corresponding epitopes in TNFR2 and are agonistic of receptor activity (see, e.g., International Application Publication No. WO 2017/040312). To generate TNFR2 agonists, phage display is used. The phage display library is contacted with under conditions in which specific binding occurs. TNFR2-derived peptide(s) (e.g., the peptides of any of SEQ ID NOS: 853-1194) are immobilized on a solid support or in the phage. Phage containing a TNFR2-binding moiety form a complex with the target on the solid support, and non-binding phage are washed away. Bound phage then are liberated from the target by changing the buffer to an extreme pH (pH 2 or 10), changing the ionic strength of the bugger, adding denaturants, or by other known means. To isolate the binding phage, a protein elution can be performed (see, e.g., International Application Publication No. WO 2017/040312).

[0868] MR2-1 is an exemplary agonistic TNFR2 antibody that binds TNFR2 and potentiates TNFR2-mediated Treg cell proliferation. MR2-1 binds osteoprotegerin, however, the heavy and/or light chain variable regions of this antibody, or specifically, the heavy and/or light chain CDRs of MR2-1, can be modified to eliminate the capacity of the resulting antibody or fragment thereof to bind a TNFR superfamily member other than TNFR2, generating an agonistic TNFR2 antibody or antigen-binding fragment thereof. This can be achieved using genetic engineering and/or antibody library screening techniques, for example, as described in International Application Publication No. WO 2017/040312.

[0869] As provided herein, the TNFR2 agonist can contain an antigen-binding fragment of an agonistic human anti-TNFR2 antibody, such as MR2-1 and MAB2261, such as the commercially available MR2-1 from Hycult Biotech; and MAB2261 from R&D Systems. For example, the V_{H} and V_{L} domains of MR2-1 or MAB2261, or one or more of the CDRs contained therein, is used to generate a TNFR2 agonist. Such an agonist can contain a human domain antibody (dAb) that is specific for TNFR2; the dAb can contain a variable-region heavy chain (V_{H}) or light chain (V_{L}) domain of MR2-1 or MAB2261, or a V_{H} or V_{L} with at least or at least about 85%, 90%, 95%, or more, sequence identity to the V_{H} or V_{L} or MR2-1 or MAB2261, provided the resulting TNFR2 retains TNFR2 agonist activity. The TNFR2 agonist also can contain other antigen-binding fragments derived from the MR2-1 or MAB2261 antibody, or sequences of amino acids with at least or at least about 85%, 90%, 95%, or more, sequence identity thereto, such as, for example, a Fab fragment, Fab′ fragment, F(ab′)₂ fragment, Fv fragment, disulfide-linked Fv (dsFv), Fd fragment, Fd′ fragment, single-chain Fv (scFv), single-chain Fab (scFab), hsFv (helix-stabilized Fv), minibody, diabody, anti-idiotypic (anti-Id) antibody, free light chains, or antigen-binding fragments of any of the above. Antibody fragments include combinations of any of the above fragments, such as, for example, tandem scFv, Fab-scFv (HC C-term, or LC C-term), Fab-(scFv)₂ (C-term), scFv-Fab-scFv, Fab-C_{H}2-scFv, scFv fusions (C term, or N term), Fab-fusions (HC C-term, or LC C-term), scFv-scFv-dAb, scFv-dAb-scFv, dAb-scFv-scFv, and tribodies. A TNFR2 agonist includes any of the dAbs whose sequences are provided herein or that are known in the art, with about or at least about 85%, 90%, 95%, or more, sequence identity thereto, and TNFR2 agonist activity.

[0870] In some embodiments, the TNFR2 agonist can be the scFv of a TNFR2 agonistic monoclonal antibody, including any known in the art, or an scFv with about or at least about 85%, 90%, 95% or more than 95% sequence identity to such scFvs, provided the resulting construct retains TNFR2 agonist activity. In some embodiments, the TNFR2 agonist can be the Fab fragment of an TNFR2 agonistic monoclonal antibody or Fab thereof or a Fab with about or at least about 85%, 90%, 95% or more sequence identity, and TNFR2 agonist activity.

[0871] The TNFR2 agonist also can be or include a TNF mutein modified to bind to TNFR2 and to have agonist activity (see, e.g., SEQ ID NOs: 765-800). Exemplary of such embodiments, are TNFR2 agonists that contain a TNFR2-selective TNF mutein, such as, for example, a TNF variant with one or more of the TNFR2-selective mutations K65W, D143Y, D143F, D143N, D143E, D143W, D143V, A145R, A145H, A145K, A145F, A145W, E146Q, E146H, E146K, E146N, D143N/A145R, A145R/S147T, Q88N/T89S/A145S/E146A/S147D, Q88N/A145I/E146G/S147D, A145H/E146S/S147D, A145H/S147D, L29V/A145D/E146D/S147D, A145N/E146D/S147D, A145T/E146S/S147D, A145Q/E146D/S147D, A145T/E146D/S147D, A145D/E146G/S147D, A145D/S147D, A145K/E146D/S147T, A145R/E146T/S147D, A145R/S147T, E146D/S147D, D143V/F144L/A145S, and D143V/A145S, and combinations thereof, such as a combination of D143V/A145S with S95C/G148C, with reference to SEQ ID NO:2. For example, TNF variants with the mutations D143N/A145R (SEQ ID NO:781) bind to and agonize TNFR2, and can be used in the constructs provided herein. A TNF mutein with the mutations S95C/G148C, and combinations with any of the others listed or known or identified, with reference to SEQ ID NO:2 also is a TNFR2-selective agonist that can be included in the constructs provided herein.

[0872] The TNFR2 agonists can contain fusions of single-chain TNFR2-selective TNF mutein trimers, with multimerization domains. As described herein, the primary ligand for TNFR2 is membrane-bound TNF (memTNF; also referred to herein as transmembrane TNF or tmTNF). The addition of multimerization domains, such as dimerization or trimerization domains, generates hexameric or nonameric molecules, respectively, with respect to the TNF subunits; these hexamers and nonamers of TNF mimic membrane-bound TNF trimers and thus, activate TNFR2 signaling. Dimerization domains include, for example, EHD2 (SEQ ID NO:808), discussed above. EHD2 is derived from the heavy chain C_{H}2 domain of IgE and MHD2 (SEQ ID NO:811), which is derived from the heavy chain C_{H}2 domain of IgM. Dimerization domains also include Fc domains, such as those derived from IgG1 (see, SEQ ID NO:10) and IgG4 (see, SEQ ID NO:16), optionally including modifications, such as those that alter immune effector functions and/or enhance FcRn recycling. Trimerization domains include, for example, the trimerization domains of chicken tenascin C (TNC) (SEQ ID NO:805) and the trimerization domain of human TNC (SEQ ID NO:807). Dimerization and trimerization enhances TNFR2 signaling, and improves pharmacological properties of the constructs. For example, the half-life of a fusion protein is increased by increasing the molecular weight of the molecule, and/or by introducing FcRn recycling, for example, when the dimerization domain is an Fc.

[0873] As provided herein, the TNFR2 agonist can contain a TNF mutein (TNFmut) trimer chain, with any of the mutations described herein that impart selectivity for TNFR2 and/or reduce or eliminate binding to TNFR1. Exemplary of such mutations are the replacements D143N/A145R, with reference to SEQ ID NO:2, fused with a multimerization domain (MD), such as a dimerization or trimerization domain. The multimerization domain can be fused to the N- or C-terminus of the TNF mutein trimer chain, and linkers are included between each TNF mutein, and between the TNF mutein trimer chain and the multimerization domain. Such TNFR2 agonists have the formulae 4 and 5:

MD-L1-TNFmut-L2-TNFmut-L3-TNFmut (Formula 4) or

TNFmut-L1-TNFmut-L2-TNFmut-L3-MD (Formula 5),

where MD is a multimerization domain (activity modifier); TNFmut is a TNFR2-selective TNF mutein, such as the mutein with the mutations D143N/A145R; and Li, L2 and L3 are linkers, described below, such as Gly-Ser linkers, that can be the same or different.

[0874] In particular embodiments, the multimerization domain is EHD2 (SEQ ID NO:808), MHD2 (SEQ ID NO:811), the trimerization domain of chicken TNC (SEQ ID NO:805), the trimerization domain of human TNC (SEQ ID NO:807), an IgG1 Fc, or an IgG4 Fc. Where the dimerization domain is an IgG1 Fc or IgG4 Fc, it is the same Fc that is used to link the TNFR1 antagonist to the TNFR2 agonist, and not an additional Fc. The IgG1 or IgG4 Fc can be modified to enhance or eliminate immune effector functions, such as ADCC, ADCP and/or CDC activities, and/or to enhance FcRn binding. The multimerization domains, such as Fc regions, increases in vivo stability and serum half-life of the construct. Fc regions, for purposes herein, in the constructs of Formulae 1-5 or variations thereof, generally are modified to alter or modulate pharmacological properties or activities of the constructs. Fc modifications are discussed in more detail below. Any multimerization domains, known in the art, also are contemplated for use in the TNFR2 agonists herein.

[0875] The TNF muteins can be TNF variants with any one or more of the mutations that impart TNFR2-selectivity. Mutations, include, for example, K65W, D143Y, D143F, D143N, D143E, D143W, D143V, A145R, A145H, A145K, A145F, A145W, E146Q, E146H, E146K, E146N, D143N/A145R, A145R/S147T, Q88N/T89S/A145S/E146A/S147D, Q88N/A145I/EI46G/S147D, A145H/E146S/S147D, A145H/S147D, L29V/A145D/E146D/S147D, A145N/E146D/S147D, A145T/E146S/S147D, A145Q/E146D/S147D, A145T/E146D/S147D, A145D/E146G/S147D, A145D/S147D, A145K/E146D/S147T, A145R/E146T/S147D, A145R/S147T, E146D/S147D, D143V/F144L/A145S, and D143V/A145S, with reference to SEQ ID NO:2. TNF variants with the mutations D143N/A145R are contemplated for use herein. Any other mutations that impart TNFR2-selectivity, known in the art, also are contemplated for use herein. The TNF muteins can contain the full sequence of soluble TNF (i.e., residues 1-157 of SEQ ID NO:2), or can contain a partial sequence of soluble TNF, such as, for example, residues 4-157, 9-157, or 12-157 of SEQ ID NO:2, of sufficient length to bind to and/or to agonize TNFR2.

[0876] The L1, L2, or L3 linkers can be the same or different. In particular, the linkers can contain a short peptide linker, such as a GS linker. For example, the linker can contain (GGGGS)ₙ, where n=1-5 (SEQ ID NO:1471). The linkers also can contain all or a portion (at least 10, 15, or 20 contiguous residues) of the stalk region of TNF-α, containing the sequence of amino acids GPQREEFPRDLSLISPLAQAVRSSSRTPSDK (SEQ ID NO:812), which corresponds to residues 57-87 of the full length sequence of TNF (transmembrane TNF), set forth in SEQ ID NO:1. For example, a linker containing all or a portion, containing at least 10, 15, or 20 contiguous amino acid residues, of the stalk region can be between the N- or C-terminal TNF mutein and the multimerization domain. All three linkers can be (GGGGS)ₙ, where n is generally 1-10 (SEQ ID NO:1472), or other combination of Gly-Ser, or can contain mixtures of Gly-Ser resides, such as (GGGGS)ₙ and all or a portion, containing at least 10, 15, or 20 contiguous amino acid residues, of the stalk region of TNF. Exemplary linkers are set forth in SEQ ID NOs: 813-834, 1471 and 1472.

[0877] TNFR2 agonists provided herein, include those that specifically bind to TNFR2 with a K_{D} value of less than or equal to or less than about 100 nM (e.g., 95 nM, 90 nM, 85 nM, 80 nM, 75 nM, 70 nM, 65 nM, 60 nM, 55 nM, 50 nM, 45 nM, 40 nM, 35 nM, 30 nM, 25 nM, 20 nM, 15 nM, 10 nM, 5 nM, 4 nM, 3 nM, 2 nM, or 1 nM). In certain cases, the TNFR2 agonists specifically bind to TNFR2 with a K_{D} value of less than 1 nM (e.g., 990 pM, 980 pM, 970 pM, 960 pM, 950 pM, 940 pM, 930 pM, 920 pM, 910 pM, 900 pM, 890 pM, 880 pM, 870 pM, 860 pM, 850 pM, 840 pM, 830 pM, 820 pM, 810 pM, 800 pM, 790 pM, 780 pM, 770 pM, 760 pM, 750 pM, 740 pM, 730 pM, 720 pM, 710 pM, 700 pM, 690 pM, 680 pM, 670 pM, 660 pM, 650 pM, 640 pM, 630 pM, 620 pM, 610 pM, 600 pM, 590 pM, 580 pM, 570 pM, 560 pM, 550 pM, 540 pM, 530 pM, 520 pM, 510 pM, 500 pM, 490 pM, 480 pM, 470 pM, 460 pM, 450 pM, 440 pM, 430 pM, 420 pM, 410 pM, 400 pM, 390 pM, 380 pM, 370 pM, 360 pM, 350 pM, 340 pM, 330 pM, 320 pM, 310 pM, 300 pM, 290 pM, 280 pM, 270 pM, 260 pM, 250 pM, 240 pM, 230 pM, 220 pM, 210 pM, 200 pM, 190 pM, 180 pM, 170 pM, 160 pM, 150 pM, 140 pM, 130 pM, 120 pM, 110 pM, 100 pM, 90 pM, 80 pM, 70 pM, 60 pM, 50 pM, 40 pM, 30 pM, 20 pM, 10 pM, 5 pM, or 1 pM).

[0878] The TNFR2 agonist is one that can induce the proliferation of Tregs (e.g., CD4⁺, CD25⁺ FOXP3⁺ Tregs), for example, in vivo in a subject to which the agonist is administered, or, for testing purposes, in vitro in a sample containing Tregs that are contacted with the TNFR2 agonist. The proliferation of Tregs can be induced, for example, by or by about 0.00001% to 100.0% (e.g., 0.00001%, 0.00002%, 0.00003%, 0.00004%, 0.00005%, 0.00006%, 0.00007%, 0.00008%, 0.00009%, 0.0001%, 0.0002%, 0.0003%, 0.0004%, 0.0005%, 0.0006%, 0.0007%, 0.0008%, 0.0009%, 0.001%, 0.002%, 0.003%, 0.004%, 0.005%, 0.006%, 0.007%, 0.008%, 0.009%, 0.01%, 0.02%, 0.03%, 0.04%, 0.05%, 0.06%, 0.07%, 0.08%, 0.09%, 0.1%, 0.2%, 0.3%, 0.4%, 0.5%, 0.6%, 0.7%, 0.8%, 0.9%, 1.0%, 2.0%, 3.0%, 4.0%, 5.0% 6.0% 7.0%, 8.0%, 9.0%, 10.0%, 20.0%, 30.0%, 40.0%, 50.0%, 60.0%, 70.0%, 80.0%, 90.0%, or 100%), as measured, for example, by FACS analysis, relative to a subject or sample containing a population of cells not treated with the TNFR2 agonist.

[0879] The TNFR2 agonist, thus, can be used to promote Treg cell proliferation and can be administered to a mammalian subject, such as a human patient, with an autoimmune or chronic inflammatory disease or disorder, in order to attenuate the magnitude and duration of an immune response (e.g., quantity of CD8⁺ cytotoxic T lymphocytes produced in vivo in response to a self or non-threatening foreign antigen) in the patient. For example, administration of the TNFR2 agonist to a human patient, or a population of Treg cells expanded ex vivo by treatment with the TNFR2 agonist, can cause a reduction in the amount of secreted immunoglobulin (e.g., IgG) that is cross-reactive with a self or non-threatening antigen, for example, by or by about 0.00001 mg/mL to 10.0 mg/mL (e.g., 0.00001 mg/mL, 0.0001 mg/mL, 0.001 mg/mL, 0.01 mg/mL, 0.1 mg/mL, 1.0 mg/mL, or 10.0 mg/mL), or by 0.001 to 1.0 mg/mL (e.g., 0.001 mg/mL, 0.005 mg/mL, 0.010 mg/mL, 0.050 mg/mL, 0.10 mg/mL, 0.20 mg/mL, 0.30 mg/mL, 0.40 mg/mL, 0.50 mg/mL, 0.60 mg/mL, 0.70 mg/mL, 0.80 mg/mL, 0.90 mg/mL, or 1.0 mg/mL), relative to a subject not treated with the TNFR2 agonist. Additionally or alternatively, the TNFR2 agonists can decrease cytotoxic T-cell counts (e.g., levels of CD8⁺ T cells), for example, by or by about 0.00001 to 100.0% (e.g., 0.00001%, 0.00002%, 0.00003%, 0.00004%, 0.00005%, 0.00006%, 0.00007%, 0.00008%, 0.00009%, 0.0001%, 0.0002%, 0.0003%, 0.0004%, 0.0005%, 0.0006%, 0.0007%, 0.0008%, 0.0009%, 0.001%, 0.002%, 0.003%, 0.004%, 0.005%, 0.006%, 0.007%, 0.008%, 0.009%, 0.01%, 0.02%, 0.03%, 0.04%, 0.05%, 0.06%, 0.07%, 0.08%, 0.09%, 0.1%, 0.2%, 0.3%, 0.4%, 0.5%, 0.6%, 0.7%, 0.8%, 0.9%, 1.0%, 2.0%, 3.0%, 4.0%, 5.0%, 6.0%, 7.0%, 8.0%, 9.0%, 10.0%, 20.0%, 30.0%, 40.0%, 50.0%, 60.0%, 70.0%, 80.0%, 90.0%, or 100%), in a subject, as measured, for example, by FACS analysis, relative to a subject not treated with the TNFR2 agonist. For example, the TNFR2 agonist can be administered to a subject (e.g., a mammalian subject, such as a human) to treat an autoimmune or chronic inflammatory disease or disorder, such as those described herein. Treatment of a subject in this manner reduces the quantity of autoreactive CD8⁺ T-cells within the subject.

[0880] The TNFR2 agonists provided herein can be assessed to identify those that lack specific binding for another TNFR superfamily member, particularly TNFR1. This can be achieved using any of a variety of in vitro binding assays, such as ELISA-based methods, known to those of skill in the art. For example, TNFR2 agonists include those that specifically bind to human TNFR2 or a TNFR2-derived peptide, such as the peptide fragment containing residues 48-67 of SEQ ID NO.4 within human TNFR2 (QTAQMCCSKCSPGQHAKVFC, SEQ ID NO:847), with an affinity that is, for example, at least or at least about 2-, 3-, 4-, or 5-fold greater (e.g., 5-fold greater, 6-fold greater, 7-fold greater, 8-fold greater, 9-fold greater, 10-fold greater, 20-fold greater, 30-fold greater, 40-fold greater, 50-fold greater, 60-fold greater, 70-fold greater, 80-fold greater, 90-fold greater, 100-fold greater, 200-fold greater, 300-fold greater, 400-fold greater, 500-fold greater, 600-fold greater, 700-fold greater, 800-fold greater, 900-fold greater, 1,000-fold greater, 2,000-fold greater, 3,000-fold greater, 4,000-fold greater, 5,000-fold greater, 6,000-fold greater, 7,000-fold greater, 8,000-fold greater, 9,000-fold greater, 10,000-fold greater, or more), than the affinity of the agonist for another TNFR superfamily member, such as TNFR1.

[0881] The TNFR2 agonists provided herein include those that exhibit high kₒₙ and low k_{off} values upon interaction with TNFR2, consistent with high-affinity receptor binding. For example, the TNFR2 agonists provided herein can exhibit kₒₙ values in the presence of TNFR2 of greater than or equal to, or greater than about 10⁴ M⁻¹s⁻¹ (e.g., greater than or greater than about 1.0×10⁴ M⁻¹s⁻¹, 1.5×10⁴ M⁻¹s⁻¹, 2.0×10⁴ M⁻¹s⁻¹, 2.5×10⁴ M⁻¹s⁻¹, 3.0×10⁴ M⁻¹s⁻¹, 3.5×10⁴ M⁻¹s⁻¹, 4.0×10⁴ M⁻¹s⁻¹, 4.5×10⁴ M⁻¹s⁻¹, 5.0×10⁴ M⁻¹s⁻¹, 5.5×10⁴ M⁻¹s⁻¹, 6.0×10⁴ M⁻¹s⁻¹, 6.5×10⁴ M⁻¹s⁻¹, 7.0×10⁴ M⁻¹s⁻¹, 7.5×10⁴ M⁻¹s⁻¹, 8.0×10⁴ M⁻¹s⁻¹, 8.5×10⁴ M⁻¹s⁻¹, 9.0×10⁴ M⁻¹s⁻¹, 9.5×10⁴ M⁻¹s⁻¹, 1.0×10⁵ M⁻¹s⁻¹, 1.5×10⁵ M⁻¹s⁻¹, 2.0×10⁵ M⁻¹s⁻¹, 2.5×10⁵ M⁻¹s⁻¹, 3.0×10⁵ M⁻¹s⁻¹, 3.5×10⁵ M⁻¹s⁻¹, 4.0×10⁵ M⁻¹s⁻¹, 4.5×10⁵ M⁻¹s⁻¹, 5.0×10⁵ M⁻¹s⁻¹, 5.5×10⁵ M⁻¹s⁻¹, 6.0×10⁵ M⁻¹s⁻¹, 6.5×10⁵ M⁻¹s⁻¹, 7.0×10⁵ M⁻¹s⁻¹, 7.5×10⁵ M⁻¹s⁻¹, 8.0×10⁵ M⁻¹s⁻¹, 8.5×10⁵ M⁻¹s⁻¹, 9.0×10⁵ M⁻¹s⁻¹, 9.5×10⁵ M⁻¹s⁻¹, or 1.0×10⁶ M⁻¹s⁻¹). For example, the TNFR2 agonists provided herein can exhibit k_{off} values, when complexed to TNFR2 of less than or less than about 10⁻³ s⁻¹ (e.g., less than or less than about 1.0×10⁻³ s⁻¹, 9.5×10⁻⁴ s⁻¹, 9.0×10⁻⁴ s⁻¹, 8.5×10⁻⁴ s⁻¹, 8.0×10⁻⁴ s⁻¹, 7.5×10⁻⁴ s⁻¹, 7.0×10⁻⁴ s⁻¹, 6.5×10⁻⁴ s⁻¹, 6.0×10⁻⁴ s⁻¹, 5.5×10⁻⁴ s⁻¹, 5.0×10⁻⁴ s⁻¹, 4.5×10⁻⁴ s⁻¹, 4.0×10⁻⁴ s⁻¹, 3.5×10⁻⁴ s⁻¹, 3.0×10⁻⁴ s⁻¹, 2.5×10⁻⁴ s⁻¹, 2.0×10⁻⁴ s⁻¹, 1.5×10⁻⁴ s⁻¹, 1.0×10⁻⁴ s⁻¹, 9.5×10⁻⁵ s⁻¹, 9.0×10⁻⁵ s⁻¹, 8.5×10⁻⁵ s⁻¹, 8.0×10⁻⁵ s⁻¹, 7.5×10⁻⁵ s⁻¹, 7.0×10⁻⁵ s⁻¹, 6.5×10⁻⁵ s⁻¹, 6.0×10⁻⁵ s⁻¹, 5.5×10⁻⁵ s⁻¹, 5.0×10⁻⁵ s⁻¹, 4.5×10⁻⁵ s⁻¹, 4.0×10⁻⁵ s⁻¹, 3.5×10⁻⁵ s⁻¹, 3.0×10⁻⁵ s⁻¹, 2.5×10⁻⁵ s⁻¹, 2.0×10⁻⁵ s⁻¹, 1.5×10⁻⁵ s⁻¹, or 1.0×10⁻⁵ s⁻¹).

[0882] As provided herein, a TNFR2 agonist is linked directly or indirectly via a linker to a TNFR1 antagonist, such as any described above, in any order or suitable configuration. For example, the N-terminus of a TNFR2 agonist, such as any of the TNFR2 agonists described herein, is fused with the C-terminus of an TNFR1 antagonist via one or more linkers, as discussed below and elsewhere herein. Alternatively, the C-terminus of the TNFR2 agonist can be fused with the N-terminus of the TNFR1 antagonist. Where the TNFR2 agonist has the structure set forth in Formula 3, the N-terminus of the multimerization domain is linked to the C-terminus of the TNFR1 antagonist, and where the TNFR2 agonist has the structure set forth in Formula 4, the C-terminus of the multimerization domain is linked to the N-terminus of the anti-TNFR1 antagonist. The linker (L), between the TNFR1 antagonist and the TNFR2 agonist, can include any suitable linkers and combinations thereof, such as one or more of an Ig Fc region, and/or an antibody hinge region, and/or a short peptide linker, such as a glycine-serine linker, for example. In some embodiments, the linker is a poly(ethylene glycol) (PEG) molecule, or a branched PEG molecule, of 30 kDa or more. As discussed above, where the TNFR2 agonist has the structure set forth in Formula 3 or 4, if the multimerization domain is an Fc, then it is the same Fc that is used to link the TNFR1 antagonist to the TNFR2 agonist.

[0883] c. Linkers

[0884] The TNFR1 antagonist constructs (such as formula 1), the multi-specific TNFR1 antagonists-TNFR2 agonist constructs (such as formula 2), and the TNFR2 agonist constructs (such as formulae 3-5), above, optionally include linkers, as well as activity modifiers. The linkers have a variety of functions, including provision of additional or improved biological and pharmacological properties, and for structural purposes for linking a different molecules. Exemplary linkers are Gly-Ser polypeptides, hinge regions (see, e.g., Tables 1-4 above, which set forth the sequences of various hinge regions, and combinations thereof).

[0885] Included are polypeptide linkers and also chemical linkers for chemical conjugation. Linker peptides are included as spaces between polypeptides, and can promote proper protein folding and stability of the polypeptides, improve protein expression, and enhance the bioactivity of the components of the constructs. Peptide linkers primarily are designed to be unstructured, flexible peptides. Linkers can be included as set forth in exemplary formulae 1-4, above. For example, in the bi-specific constructs provided, the components are fused via a linker (L) in an N-terminus to C-terminus, or C-terminus to N-terminus configuration. The linker generally is a peptide linker, including a polypeptide, such as an Fc region, alone, or in combination with one or more other linkers, including, for example, short peptide linkers, such as a glycine-serine (GS) linker, and/or the hinge region of an immunoglobulin (Ig). In embodiments herein, for example, the C-terminus of the TNFR1 antagonist is fused to the N-terminus of the peptide linker(s), and the C-terminus of the peptide linker(s) is fused with the N-terminus of the TNFR2 agonist. In other embodiments, the C-terminus of the TNFR2 agonist is fused to the N-terminus of the peptide linker(s), and the C-terminus of the peptide linker(s) is fused with the N-terminus of the TNFR1 antagonist. The linker provides increased molecular weight, increasing the stability and serum half-life, enhancing tissue retention, and reducing or decreasing peripheral elimination, thereby improving the therapeutic index of the molecule. The linker also increases the flexibility of the molecule, allowing each portion of the molecule to interact with its target antigen/epitope, such as TNFR1 and TNFR2, as provided herein. As discussed below and elsewhere herein, in embodiments where the linker contains an Fc region of an immunoglobulin, generally a modified Fc region, additional properties can be imparted, including, for example, neonatal Fc receptor (FcRn) recycling, which further increases serum stability and half-life, and/or the enhancement or elimination of immune effector functions.

[0886] i. Peptide Linkers

[0887] Linkers for fusion proteins are well known to those of skill in the art (see, e.g., Chen et al (2013) Adv. Drug. Deliv. Rev. 65:1357-1369, entitled “Fusion Protein Linkers: Property, Design and Functionality”). Linkers can be designed or can be from or based on linkers from naturally-occurring multi-domain proteins. Empirical linkers designed by researchers are generally classified into 3 categories, according to their structures: flexible linkers, rigid linkers, and in vivo cleavable linkers, which are used, for example, for delivering prodrugs that are activated by cleavage of the linker in situ.

[0888] Besides the role in linking the functional domains together (as in flexible and rigid linkers) or releasing the free functional domain in vivo (as in in vivo cleavable linkers), linkers also can improve properties of the linked moieties. These include, for example, improving biological activity, increasing expression yield, and achieving desirable pharmacokinetic profiles. Databases and methods for selecting linkers are known to those of skill in the art (see, e.g., George et al. (2002) “An analysis of protein domain linkers: their classification and role in protein folding,” Protein Eng. 15:871-879).

[0889] a) Flexible Linkers

[0890] Flexible linkers are usually applied when the joined domains require a certain degree of movement or interaction. Flexible linkers are generally rich in small or polar amino acids such as Gly and Ser to provide good flexibility and solubility. They are suitable choices when certain movements or interactions (e.g., in an scFv) are required for fusion protein domains. In addition, although flexible linkers do not have rigid structures, they can serve as a passive linker to keep a distance between functional domains. The length of the flexible linkers can be adjusted to allow for proper folding or to achieve optimal biological activity of the fusion proteins.

[0891] Flexible linkers generally are composed of small, non-polar (e.g. Gly) or polar (e.g., Ser or Thr) amino acids as suggested by Argos (1990) J. Mol. Biol. 211(4):943-958. The small size of these amino acids provides flexibility, and allows for mobility of the connecting functional domains. The incorporation of Ser or Thr can maintain the stability of the linker in aqueous solutions by forming hydrogen bonds with the water molecules, and therefore reduces the unfavorable interaction between the linker and the protein moieties.

[0892] Exemplary flexible linkers are linkers that contain primarily or only stretches of Gly and Ser residues (“GS” linkers). An example is a flexible linker that has the sequence of (Gly-Gly-Gly-Gly-Ser)ₙ. By adjusting the copy number “n”, the length of this GS linker can be selected or chosen to achieve appropriate separation of the functional domains, or to maintain necessary inter-domain interactions. Flexible linkers are also rich in small or polar amino acids such as Gly and Ser, and also can contain additional amino acids, such as Thr and Ala, to maintain flexibility, as well as polar amino acids, such as Lys and Glu, to improve solubility.

[0893] To confer protease resistance and to increase the flexibility of the fusion protein, the SCDKTH hinge sequence and other hinge sequences can be replaced with, or preceded by, a short polypeptide linker. Exemplary of polypeptide linkers are (Gly-Ser)ₙ amino acid sequences (GS linkers), with some Glu or Lys residues dispersed throughout to increase solubility. For example, polypeptide linkers include, but are not limited to, (GlySer)ₙ, where n=1-10; (GlySer₂); (Gly₄Ser)ₙ, where n=1-10; (Gly₃Ser)ₙ, where n=1-5; (SerGly₄)ₙ, where n=1-5; (GlySerSerGly)ₙ, where n=1-5; GSGGSSGG; GSSSGSGSGSSG; GSSSGSGSGSSGG; GGSSGG; GGSSGGSGGSSSG; GSSSGSGSGGSSSGSGSG; GGSSGGSSGGGSSGGSSG; and GSSSGS (see SEQ ID NOs: 816-827 for the GS linkers). The linker can be a poly-Gly peptide that is at least 2-18 residues in length, or longer, or a similar linker of the same length and flexibility. Exemplary polypeptide linkers in the molecules provided herein, include, but are not limited to (see SEQ ID NOs: 816-827 for Gly-Ser linkers): GSGS, GGGGS, or GGGGSGGGGSGGGGS, for example. Another linker that provides similar performance is a (GGGGS)₄ (SEQ ID NO:819) linker. Another Gly and Ser rich flexible linker is GSAGSAAGSGEF (SEQ ID NO:828). This linker has been shown to maintain good solubility in aqueous solutions. Linkers that contain only glycine can be used. For example (Gly)₆ (SEQ ID NO:1473) and (Gly)₈ (SEQ ID NO: 1474) linkers are known and shown to be stable against proteolytic enzymes digestion during protein purification from the expression organism.

[0894] Several other types of flexible linkers, including KESGSVSSEQLAQFRSLD (SEQ ID NO:829), and EGKSSGSGSESKST (SEQ ID NO:830). The Gly and Ser residues in the linker provide flexibility, and the Glu and Lys improve the solubility.

[0895] b) Rigid Linkers

[0896] While flexible linkers have the advantage of connecting functional domains passively and permitting certain degree of movements, the lack of rigidity of these linkers can be limiting. Rigid linkers are chosen when the spatial separation of the domains is needed to preserve the stability or bioactivity of the fusion proteins. Rigid linkers exhibit relatively stiff structures by adopting α-helical structures or by containing multiple Pro residues. The length of the linkers can be easily adjusted by changing the copy number to achieve an optimal distance between domains.

[0897] Alpha helix-forming linkers with the sequence of (EAAAK)ₙ (SEQ ID NO:831) have been applied to the construction of many recombinant fusion proteins. An α-helical structure is rigid and stable, with intra-segment hydrogen bonds and a closely packed backbone. The stiff α-helical linkers can act as rigid spacers between protein domains. An example of a rigid linker is: A(EAAAK)ₙA (SEQ ID NO:832), wherein n=2-5. This linker displays an α-helical conformation, which was stabilized by the Glu-Lys⁺ salt bridges within segments. Another type of rigid linker has a Pro-rich sequence, (XP)ₙ, where X designates any amino acid, and is generally Ala, Lys, or Glu. The presence of Pro in non-helical linkers increases stiffness, and allows for effective separation of the protein domains. Examples of such linkers are 33-residue peptides containing repeating -Glu-Pro- and -Lys-Pro-.

[0898] Those of skill in the art can select from known linkers or design linkers. Desirable properties and requisites therefor are known. The following discussion summarizes some exemplary linkers (see, Chen et al. (2013) Adv. Drug. Deliv. Rev. 65:1357-1369), which provides details of flexible and rigid and cleavable linkers and that can be used). Flexible linkers are rich in small and/or hydrophilic amino acids such as Gly or Ser to provide the structural flexibility and have been use to connect functional domains that favor interdomain interactions or movements. Rigid linkers may be used where sufficient separation of protein domains is needed. Rigid linkers are designed or selected to be those that adopt α-helical structures or incorporate proline. Rigid linkers can keep protein moieties at a distance. Flexible and rigid linkers are stable in vivo, and do not allow the separation of joined proteins. Cleavable linkers permit the release of free functional domain in vivo via reduction or proteolytic cleavage. They generally are used for delivery of a prodrug to a target site.

[0899] In Formula 2, above, an additional linker, such as between the TNFR1 antagonist and/or the TNFR2 agonist portions, and the activity-modifying portion, such as the Fc portion, can be included; such linkers can contain, for example, all or a portion of the hinge sequence, sufficient to provide flexibility, of trastuzumab, including at least the residues SCDKTH (corresponding to residues 222-227 of SEQ ID NO:26), or all or a portion, containing a sufficient portion to provide flexibility, of the hinge region of nivolumab, with the sequence ESKYGPPCPPCP (corresponding to residues 212-223 of SEQ ID NO:29) or a sequence having at least 98% or 99% sequence identity thereto, or any other suitable antibody hinge region or sequence known in the art.

[0900] In certain embodiments, only a GS linker is included. Other short peptide linkers, known in the art, also are contemplated for use in the bi-specific molecules provided herein. For example, the N- or C-terminal extensions from an Fc can be used as a linker. The C-terminal extension from human IgG, ELQLEESSAEAQDGELDG (SEQ ID NO:833) or a sequence having at least 98% or 99% sequence identity thereto, or a variant containing the sequence ELQLEESSAEAQGG (SEQ ID NO:834) or a sequence having at least 98% or 99% sequence identity thereto, also can be used as a linker.

[0901] A second Fc subunit, which is or is not a fusion protein, can be included (see, e.g., FIG. 2, and can be modified to contain knobs-in-holes (see discussion below). It will assemble within the mammalian cell expression system to form a knobs-in-hole mediated Fc dimer to create an Fc dimer, which further increases the serum half-life and stability of the molecule. In certain embodiments, the second Fc subunit is fused with a second TNFR2 agonist, creating a bivalent antibody-like structure. In other embodiments, only one Fc subunit is included (an Fc monomer).

[0902] ii. Chemical Linkers

[0903] In some embodiments, the linker is a chemical linker. These include linkers that are non-cleavable moieties, chemical cross-linking reagents, and polypeptide modifying agents, such as polymeric molecules, including PEGylation moieties. Chemical linkers are more amenable to creation of branched constructs and other structures that cannot be achieved with peptide linkers.

[0904] Exemplary linkers include non-cleavable linkers. Non-cleavable linkers include, for example, amide linkers and amide and ester linkages with succinate spacers (see, e.g., Dosio et al., (2010) Toxins 3:848-883). Exemplary chemical cross-linking linkers include, but are not limited to, SMCC (Succinimidyl-4-(N-maleimidomethyl)cyclohexane-1-carboxylate) and SIAB (Succinimidyl (4-iodoacetyl)aminobenzoate). SMCC is an amine-to-sulfhydryl crosslinker that contains NHS-ester and maleimide reactive groups at opposite ends of a medium-length cyclohexane-stabilized spacer arm. SIAB is a short, NHS-ester and iodoacetyl crosslinker for amine-to-sulfhydryl conjugation. Other exemplary cross-linking reagents include, but are not limited to, thioether linkers, chemically labile hydrazone linkers, 4-mercaptovaleric acid, BMPEO, BMPS, EMCS, GMBS, HBVS, LC-SMCC, MBS, MPBH, SBAP, SIA, SMPB, SMPH, sulfo-EMCS, sulfo-GMBS, sulfo-KMUS, sulfo-MBS, sulfo-SIAB, sulfo-SMCC, and sulfo-SMPB, and SVSB (succinimidyl-(4-vinylsulfonyl)benzoate), and bis-maleimide reagents, such as DTME, BMB, BMDB, BMH, BMOE, BM(PEO)₃, and BM(PEO)₄, which are commercially available (Pierce Biotechnology, Inc.). Bis-maleimide reagents allow the attachment of a free thiol group of a cysteine residue of an antibody to a thiol-containing targeted agent, or linker intermediate, in a sequential or concurrent fashion. Other thiol-reactive functional groups, besides maleimide, include iodoacetamide, bromoacetamide, vinyl pyridine, disulfide, pyridyl disulfide, isocyanate, and isothiocyanate. Other exemplary linkers and methods of use are well known to those of skill in the art, for example, the linkers and methods described in U.S. Patent Publication No. 2005/0276812, and in Ducry et al. (2010) Bioconjug. Chem. 21:5-13.

[0905] Linkers optionally can be substituted with groups that modulate properties, such as solubility and reactivity. For example, a sulfonate substituent can increase water solubility of the reagent and facilitate the coupling reaction of the linker reagent with and antibody or drug moiety, and/or facilitate coupling reactions. Linker reagents can also be obtained via commercial sources, such as Molecular Biosciences Inc. (Boulder, Colo.), or synthesized in accordance with procedures described in Toki et al. (2002) J. Org. Chem. 67:1866-1872; U.S. Pat. No. 6,214,345; U.S. Publication Nos. 2003/130189, and 2003/096743; and International Application Publication Nos. WO 02/088172, WO 03/026577, WO 03/043583, and WO 04/032828. For example, linker reagents such as DOTA-maleimide (4-maleimidobutyramidobenzyl-DOTA) can be prepared by the reaction of aminobenzyl-DOTA with 4-maleimidobutyric acid (Fluka) activated with isopropylchloroformate (Aldrich), following the procedure of Axworthy et al. (2000) Proc. Natl. Acad. Sci. U.S.A. 97(4):1802-1807. DOTA-maleimide reagents react with the free cysteine amino acids of the cysteine engineered antibodies and provide a metal complexing ligand on the antibody (Lewis et al. (1998) Bioconj. Chem. 9:72-86). Chelating linker labelling reagents, such as DOTA-NHS (1,4,7,10-tetraazacyclododecane-1,4,7,10-tetraacetic acid mono (N-hydroxysuccinimide ester)), are commercially available (Macrocyclics, Dallas, Tex.).

[0906] The linker can be a dendritic type linker for covalent attachment of more than one moiety through a branching, multifunctional linker moiety to an antibody (see, e.g., Sun et al. (2002) Bioorganic & Medicinal Chemistry Letters 12:2213-2215; Sun et al. (2003) Bioorganic & Medicinal Chemistry 11:1761-1768; King et al. (2002) Tetrahedron Letters 43:1987-1990). If an antibody bears only one reactive cysteine thiol group, a multitude of other moieties can be attached through a dendritic linker. Exemplary dendritic linker reagents are known (see, e.g., U.S. Patent Publication No. 2005/0276812).

[0907] Another example of a chemical linker (also can be an activity modifier for use in constructs herein) are PEG molecules, and branched PEG molecules, particularly those with a molecular weight of 30 kDa or more. A PEG linker provides for the introduction of multispecificity and bivalency (in the case of TNFR2 agonists where receptor clustering enhances signaling), and increases the molecular weight of the molecule, which increases in vivo serum half-life. PEG linkers also ameliorate difficulties in the re-engineering of antibodies, for example, by avoiding the introduction of non-natural structures that are degraded and cleared rapidly and/or cause immunogenicity.

[0908] d. Activity Modifiers

[0909] Among the components of constructs are portions or regions that modulate or alter the activity and/or pharmacological properties of the constructs (see formula 1 and 2 above). Exemplary of such are Fc regions, modified Fc regions, other multimerization domains, dimers of the Fc and modified Fc, and other moieties, such as polymeric moieties, including polypeptides, such as half-life extending polypeptides, albumins, such as human serum albumin (HSA), and transferrin, and polymers, such as PEG, discussed elsewhere herein, that can increase serum half-life. Activity modifiers can confer properties, such as, but not limited to, extending plasma half-life by decreasing access to proteases, decreasing renal filtration, and/or by altering the intracellular routing via receptor-mediated recycling; providing for absorption across epithelial bilayers by binding to receptors that undergo transcytosis; targeting in vivo sites that over-express or uniquely express specific receptors or antigens; and other properties, as exemplified in the discussion below, and also as known in the art.

[0910] As provided herein, the constructs can include, as an activity modifier, the Fc region of a human immunoglobulin, such as an IgG, for example, an IgG1 Fc (SEQ ID NO:10), an IgG2 Fc (SEQ ID NO:12), an IgG3 Fc (SEQ ID NO:14), or an IgG4 Fc (SEQ ID NO:16). In particular, the Fc is derived from an IgG1 or IgG4 antibody. For example, the linker can include an IgG1 kappa Fc region, such as the IgG1 Fc derived from trastuzumab, containing the C_{H}2 and C_{H}3 domains of the trastuzumab heavy chain (see, e.g., residues 234-450 of SEQ ID NO:26; see, also, SEQ ID NO:27). The Fc subunit in the bi-specific molecules provided herein also can be an IgG4 Fc, such as, for example, the IgG4 Fc derived from nivolumab (Opdivo®), containing the C_{H}2 and C_{H}3 domains of the nivolumab heavy chain (see, e.g., residues 224-440 of SEQ ID NO:29; see, also, SEQ ID NO:30).

[0911] The Fc region can be mutated or modified, as discussed below, to eliminate, reduce, or enhance, immune effector functions, including, for example, any one or more of antibody-dependent cellular cytotoxicity (ADCC; also known as antibody-dependent cell-mediated cytotoxicity), antibody-dependent cell-mediated phagocytosis (ADCP), and complement-dependent cytotoxicity (CDC). In some embodiments herein, for example, where the construct is a bi-specific molecule is used to treat inflammatory and autoimmune diseases and conditions, immune effector functions are eliminated or reduced. Where the therapeutic is used in the treatment of a tumor or cancer, immune effector functions can be enhanced to improve the anti-tumor immune response and therapeutic efficacy. Additionally, or alternatively, the Fc region is modified to enhance FcRn recycling, to increase the in vivo serum stability and half-life of the molecules provided herein.

[0912] For purposes here, the Fc regions or domains are modified, particularly to decrease or eliminate ADCC. Small molecule therapeutics, such as antibody fragments (e.g., Fabs, scFvs, dAbs), are advantageous. They can be produced in high yields, and have other advantageous properties. They exhibit enhanced tissue penetration and target accessibility compared to monoclonal antibodies (mAbs), and they can prevent undesirable effects of mAbs, such as, for example, receptor clustering, the activation of immune effector functions, poor tissue penetration and lack of access to targets in poorly vascularized areas. Small antibody fragments, however, have poor pharmacokinetic properties. For example, due to their small size, dAbs and other antibody fragments are rapidly cleared by the kidneys, as molecules that are 50-60 kDa in size or smaller are subject to renal filtration. The rapid clearance and short elimination half-life of small antibody fragments, which can be less than a few hours, decreases the in vivo efficacy and necessitates frequent administration and/or continuous infusion.

[0913] Several methods can be used to increase the retention and in vivo half-life of small antibody fragments, such as dAbs. For example, as provided herein, the dAb(s) in the TNFR1 antagonist, TNFR2 agonist and combination/multi-specific constructs is/are fused to a linker that is or includes a half-life extender, such as, for example, the Fc region of an IgG, such as IgG1 or IgG4. The Fc can be a monomer or a dimer. Fusion of small antibody fragments, such as dAbs, to the Fc region of an IgG molecule increases the size of the molecule, thereby protecting it from being cleared/excreted from the body, and mediates binding to the neonatal Fc receptor (FcRn) expressed on endothelial cells, which protects antibodies from lysosomal degradation and prolongs the in vivo half-life of the antibody. The addition of an Fc, however, can introduce unwanted properties, such as the induction of immune effector functions that can result in complement activation, the release of proinflammatory cytokines and cytotoxicity. Because TNFR1 is almost universally expressed, and TNFR2 is expressed by many tissues, it generally is not desirable to use ADCC-enhanced antibodies, but rather rely on the antagonist activity of the antibody for efficacy.

[0914] As described herein, the Fc region in the TNFR1 antagonist, TNFR2 agonist, and multi-specific, such as bispecific, constructs, is modified to improve pharmacokinetic and pharmacodynamic (i.e., pharmacological) properties, and to eliminate undesirable properties. For example, the Fc region is modified to take advantage of/enhance neonatal FcR recycling to increase the in vivo half-life, and/or is mutated to eliminate Fc-related immune effector functions, such as antibody-dependent cellular cytotoxicity (ADCC; also known as antibody-dependent cell-mediated cytotoxicity), antibody-dependent cell-mediated phagocytosis (ADCP), and complement-dependent cytotoxicity (CDC). Additionally, in embodiments where the construct is multi-specific, such as bispecific, such as embodiments in which it contains an TNFR1 antagonist and an TNFR2 agonist, and contains an Fc dimer, the dimer is mutated to introduce knobs-in-holes to prevent homodimerization. Numerous modifications to Fc portions (or regions) are known to those of skill in the art (see, e.g., Li et al., (2014) Expert Opin Ther Targets 18:335-350).

[0915] i. Modifications to the Fc Portions

[0916] a) Knobs-In-Holes

[0917] Bispecific antibodies (bsAbs) include two distinct antigen-binding sites, allowing for an alternative therapeutic approach to conventional therapeutic monoclonal antibodies (mAbs), whereby, limitations associated with mAbs, such as receptor co-clustering, can be avoided. While small antibody fragments are easier and less expensive to produce in high yields, and can easily penetrate tissues, they are associated with limitations, such as poor stability, solubility, and pharmacokinetic properties. For example, their small size results in shorter serum half-lives, reduced tissue retention and rapid clearance from the blood through the kidneys. As a result, IgG-like bi-specific (bs) Abs, which do not have the same limitations, are advantageous. For example, bsAbs can include an Fc region to increase the serum half-life, and also, to permit effector functions where desirable. The production of high yields of purified bsAbs, however, can be challenging, as homodimerization of the heavy chains must be prevented. The “knobs-in-holes” (KiH; also known as “knobs-into-holes”) approach provides a solution to this problem. The C_{H}3 domains of antibody (IgG) heavy chains are engineered for heterodimerization, to allow for the construction of Fc-containing bi-functional therapeutic molecules that will not self-associate.

[0918] The knobs-in-holes approach involves asymmetrically mutating interfacial residues in the C_{H}3 domains of the two parental heavy chains in a complementary manner. “Knobs” are created by replacing amino acids with small side chains with amino acids with larger side chains, such as tyrosine or tryptophan, at the interface between C_{H}3 domains, and “holes” are created by replacing amino acids with large side chains with amino acids with smaller ones, such as alanine or threonine. The knob and hole variants heterodimerize by virtue of the knob inserting into a correspondingly designed hole on the partner C_{H}3 domain. Knob-knob association is prevented due to steric repulsion, and hole-hole homodimers are destabilized. The knob mutation, for example, can be S354C, T366Y, T366W, or T394W, and the hole mutation can be Y349C, T366S, L368A, F405A, Y407T, Y407A, or Y407V (all by EU numbering). It has been shown that knobs created towards the center of the dimer interface, such as at residue T366, are more disruptive to homodimer formation than those located near the edge of the dimer interface. Residue T366 on the first C_{H}3 domain is within hydrogen-bonding distance of residue Y407 on the second or partner C_{H}3 domain, thus, T366Y and Y407T represent a common knob-in-hole pair; this pair has been shown to generate heterodimers in yields of over 90% (see, e.g., Ridgway et al. (1996) Protein Eng. 9(7):617-621).

[0919] The IgG Fc regions, for example, in the bispecific TNFR1 antagonist/TNFR2 agonist constructs provided herein can be modified using the knobs-in-holes approach to generate heterodimerized molecules in high yields. Table 6, below, shows the corresponding knob and hole mutations by Kabat numbering and sequential numbering, with reference to the sequence of the IgG1 heavy chain constant domain set forth in SEQ ID NO:9. Any mutations known to those of skill in the art that introduce knobs-in-holes can be employed in constructs herein.

TABLE 6
IgG1 Fc Modifications that Introduce Knobs-into-Holes

| | | | Modifications by |
|---|---|---|---|
| | Modifications | Modifications | Sequential |
| Modification | by EU | by Kabat | Numbering |
| Type | Numbering | Numbering | (SEQ ID NO: 9) |
| Knob | S354C | S375C | S237C |
| Knob | T366Y | T389Y | T249Y |
| Knob | T366W | T389W | T249W |
| Knob | T394W | T422W | T277W |
| Hole | Y349C | Y370C | Y232C |
| Hole | T366S | T389S | T249S |
| Hole | L368A | L391A | L251A |
| Hole | F405A | F436A | F288A |
| Hole | Y407T | Y438T | Y290T |
| Hole | Y407A | Y438A | Y290A |
| Hole | Y407V | Y438V | Y290V |

[0920] Ligand Trap Constructs

[0921] Fcs modified to have “knobs-in-holes” as described above also can be employed with other bi-specific molecules to produce heterodimers. For example, U.S. Patent Publication No. 2010/0055093, and Jin et al. (2009) Mol. Med. 15:11-20, describe bispecific “ligand” trap constructs that target EGF receptor family ligands, including one designated RB200, and another designated RB242. A problem with those constructs, is that they are heterogeneous, and contain homodimers, and heterodimers, the latter of which are the intended therapeutic. RB200 and RB242 are exemplary of the ligand traps that can be modified by replacing the Fc portions with modified Fc regions that have complementary knobs and holes, so that the resulting dimers all are heterodimers. RB242 targets HER1 (EGFR), HER2, and HER3 ligands, and some HER4 ligands. It was designed so that it does not trap HER4-specific ligands because HER4 has roles in neuronal development that are not shared by other members of the EGFR family. RB242 is composed of the extracellular domain (ECD) of HER1/ErbB1 (amino acids 1 to 621 of SEQ ID NO:41) and HER3/ErbB3 (amino acids 1 to 621 of SEQ ID NO:45), fused with the Fc domain of human immunoglobulin G1 (IgG1) (HER1-HER3/Fc), and acts as a chimeric bispecific ligand trap. The HER3/Fc component of RB242 contains a 6×Histidine tag on the COOH terminal (see, e.g., Jin et al. (2009) Mol. Med. 15:11-20). RB200 binds HER1/ErbB1 ligands (EGF, TGF-α, HB-EGF, AR, BTC, EPR and EPG) and HER3/ErbB3 ligands (NRG1-α and NRG1-β3) with high affinity. RB242 inhibits EGF-stimulated and NRG1-β1-stimulated tyrosine phosphorylation of HER family proteins (HER1, HER2 and HER3), and has shown potency in a variety of cell proliferation assays. RB200 inhibits tumor growth in in vivo animal models.

[0922] The epidermal growth factor (EGF) ligand/receptor family plays a role in a variety of diseases, disorders, and conditions, including rheumatoid arthritis (RA). The EGF family (ErbB and the human epidermal growth factor receptor (HER)) of cell-surface receptors belong to the receptor tyrosine kinase (RTK) superfamily and contain extracellular domains (ECDs) and an intracellular tyrosine kinase signaling domain. The EGF family has four members: EGF receptor (EGFR)/HER1/ErbB1, HER2/ErbB2, HER3/ErbB3, and HER4/ErbB4, which are activated by a large family of ligands, including EGF, transforming growth factor α (TGF-α), heparin-binding EGF-like growth factor (HB-EGF), amphiregulin (AR), β-cellulin (BTC), epiregulin (EPR), epigen (EPG) and neuregulin (NRG). Within the EGFRs there are four ECDs; domains I and III are ligand-binding domains, and domains II and IV mediate binding to each other and to other members of this receptor family. Ligand binding induces the formation of homo- or heterodimers between the receptors. For example, TGF-α and EGF bind to EGFR/HER1/ErbB1, whereas NRG4 binds to HER4/ErbB4. Depending on the dimer formed, transphosphorylation of intracellular regions occurs, leading to the activation of numerous downstream signaling pathways, which results in cell proliferation, survival and differentiation (see e.g., Jin et al. (2009) Mol. Med. 15:11-20).

[0923] The epidermal growth factor receptor family is composed of four closely related receptor tyrosine kinases: EGFR (ErbB-1), HER2 (Erb-B2), HER3 (ErbB-3) and HER 4 (ErbB-4). In many cancer types, mutations or amplification of one the family members is associated with worsened survival in cancer patients. In autoimmune disease, TNF signaling transactivates the EGFR signaling pathway by inducing the synthesis of epiregulin and heparin-binding EGF (HB-EGF) on macrophages, both growth factors that activate the EGFR.

[0924] In a complementary manner, the EGFR and HER2 are upregulated on synovial fibroblasts, thereby driving their proliferation. EGFR, HER2 (ErbB2), and EGF-like growth factors are overexpressed, for example, in RA synovial fibroblasts and macrophages. Thus, the TNF and the EGFR pathways cooperate in the progression of lupus and rheumatoid arthritis, and other autoimmune diseases. Among the constructs provided herein are constructs designated as “ligand traps.” The ligand trap constructs intercept most inflammatory growth factors of the EGFR family, thereby suppressing the growth of rapidly growing synovial fibroblasts in affected RA joints. These ligand traps are for administration in combination therapy protocols with the TNF blocker constructs that are TNFR1- and/or TNFR2-targeting constructs provided herein. This combination therapy, such as for rheumatoid arthritis, synergistically can combine to achieve disease regression.

[0925] The EGFR family of growth factors are overexpressed in hyperproliferative/inflammatory diseases such as RA, and also is overexpressed in ovarian and other cancers. Elevated levels of the EGFR family and/or its cognate are a common component of multiple types of cancer. When overexpressed (or sometimes mutated) these receptors are causally associated with shorter survival in many kinds of malignancies. Examples of targeted therapeutics that act via the EGFR family are (listed with generic name and exemplary trademark providing source) cetuximab (Erbitux®), panitumumab (Vectibix®), trastuzumab (Herceptin®), and pertuzumab (Perjeta®). Small molecule inhibitors also target the intracellular tyrosine kinase activity of the EGFR family. Examples of small molecules include lapatinib (Tykerb®), erlotinib (Iressa®), and neratinib (Nerlynx®). These drugs target only one of the EGFR family members, with the result that other members of the family can upregulate and compensate tumor growth. Similarly, an antibody vs. a single growth factor (e.g., TGF-α, EGF, HB-EGF, and others) inhibits only that growth factor, and the tumor cell will compensate by upregulating other growth factors. The ligand trap constructs provided herein address this by blocking HER1, HER2 and HER3 together. This results in pan-inhibition of the EGFR family on cancer cells. Ovarian cancer is among the cancers that are for treatment.

[0926] The ligand trap constructs provided herein are improved by optimizing heterodimer production, and FcRn recycling, using the Fc regions modified as described herein below for the TNFR1/TNFR2 constructs. The ligand trap constructs are administered in combination therapy protocols with the TNFR1 antagonist constructs, and/or the TNFR2 agonist constructs, and/or the multi-specific TNFR1 antagonist/bi-specific constructions, and/or any other constructions provided herein for treatment of diseases, disorders, and conditions in which TNF plays a role as described herein and/or known to those of skill in the art.

[0927] b) Modifications that Enhance Neonatal Fc Receptor (FcRn) Recycling

[0928] There are numerous approaches to increasing the short serum half-life of small polypeptide or protein therapeutics. PEGylation, which is increases the serum half-life of small protein therapeutics, has a disadvantage. PEGylation can decrease potency or activity of a protein therapeutic, can result in heterogeneity, and can result immunoreactivity of the protein. Other approaches involve fusion to albumin, which can improves protein circulation by increasing the molecular weight and reducing renal clearance.

[0929] Serum half-life also can be increased by fusion to Fc portion of IgGs. The long circulating half-life of approximately 2-3 weeks, and slow clearance rate, of IgGs results at least in part, from their interaction with the neonatal Fc receptor (FcRn), which binds IgGs with high affinity at acidic pH, and releases them at neutral or higher pH. FcRn binds to the Fc portion (within the C_{H}2-C_{H}3 domains) of pinocytosed IgGs in the acidic (˜pH 6) endosome in a 2:1 FcRn:IgG configuration (bivalent interaction), traffics them away from the lysosomal degradation pathway and to the cell surface, and recycles them back into circulation after exposure to the extracellular physiological pH (˜7.4), at which the Fc-FcRn complex dissociates. Poor binding to FcRn at acidic pH results in trafficking of an antibody to the lysosome where it is degraded. Recycling receptors, such as FcRn, also provide a route for the transport of IgGs across the epithelium (transcytosis) and into the blood stream. Leveraging the interaction with FcRn can improve protein transport across epithelial barriers, such as in the gut and the lungs, allowing for noninvasive administration. Residues in the Fc C_{H}2 and C_{H}3 domains are involved in FcRn binding, and their mutation in mAbs has been shown to affect the in vivo serum half-life. The circulation and delivery of small protein therapeutics can be improved by fusing them to the Fc domain of IgG, such that the resulting fusion proteins bind to FcRn and take advantage of the IgG serum stabilization pathway. Fusion with an Fc domain also increases the molecular weight of the therapeutic, reducing renal clearance, but can be undesirable due to the potentially reduced tissue penetration and specific activity of the fusion protein. Alternatively, studies have shown that short FcRn-binding peptides (FcRnBPs) allow for the interaction of small proteins with FcRn, obviating the need for fusion to a high molecular weight Fc domain. For example, fusion with an FcRnBP increases the molecular weight by approximately 3 kDa, in comparison to fusions with Fc or albumin, which increase the molecular weight by approximately 50-70 kDa (see, e.g., Datta-Mannan et al. (2019) Biotechnol. J. 14:1800007; Sockolosky et al. (2012) Proc. Natl. Acad. Sci. USA 109(40):16095-16100).

[0930] For example, short (16 residue) linear and cyclic FcRnBPs (see, e.g., SEQ ID NOs: 48-51) have been fused to the C-terminus, N-terminus, or both, of Fab heavy and light chains (FcRnBP-Fab constructs), with 1-4 FcRnBPs per Fab. Studies of the pharmacokinetics in cynomolgus monkeys have shown that the FcRn binding of FcRnBP-Fab constructs increases as the number of peptides fused to the Fab increases. This results from increased avidity, with constructs containing four linear FcRnBPs fused to the N- and C-termini of the heavy and light chains of the Fab showing the greatest improvement in pharmacokinetics in cynomolgus monkeys relative to the parental Fab. For example, the half-life improved from 3.7 hours for the parental Fab, to between 15-60 hours for the various FcRnBP-Fab constructs (see, e.g., Datta-Mannan et al. (2019) Biotechnol. J. 14:1800007). While these results indicate an improvement in serum half-life, it is still much lower than the half-life for an IgG, which is about 2-3 weeks. The use of FcRnBPs also does not reduce renal clearance, as they do not significantly increase the molecular weight of the therapeutics.

[0931] As discussed above, fusion with an IgG Fc increases the half-life of small protein therapeutics by taking advantage of FcRn binding, and also by increasing the molecular weight of the therapeutic, such that it is less rapidly cleared from the body, for example, by the kidneys. To improve the pharmacokinetics and overall pharmacology, residues within the Fc region can be mutated to increase the affinity for FcRn, generally by greater than 30-fold, further increasing the in vivo half-life. The Fc region spanning the interface of the C_{H}2 and C_{H}3 domains interacts with FcRn. Human Fc residues identified to play a role in FcRn binding include, for example, L251, M252, I253, S254, L309, H310, Q311, L314, E380, N434, H435 and Y436 (by EU numbering, see Table 1). Mutations in residues located at the Fc-FcRn interface, including M252, S254, T256, H433, N434 and Y436 (by EU numbering), improve the stability of the human FcRn-IgG1 complex. For example, the replacements M252Y/S254T/T256E and H433K/N434F/Y436H result in an 11-fold and 6.5-fold improvement in binding to human FcRn at pH 6.0 relative to the wild-type IgG1, respectively, with efficient release at pH 7.4. The combination of these replacements results in a 57-fold increase in binding affinity to FcRn. Additional mutations in IgG1 Fc that showed an improvement in binding to FcRn include, for example, M252W, M252Y, M252Y/T256Q, M252F/T256D, E380A, and N434F/Y436H (see, e.g., Dall'Acqua et al. (2002) J. Immunol. 169:5171-5180).

[0932] The triple substitution M252Y/S254T/T256E, when introduced into the C_{H}2 domain of MEDI-524, a humanized anti-respiratory syncytial virus (RSV) mAb, increased the serum half-life of the mAb approximately 4-fold in cynomolgus monkeys when compared to unmodified MEDI-524. When introduced into the Fc portion of MEDI-522, a humanized, affinity-optimized mAb directed against the human αᵥβ₃ integrin complex, the replacements M252Y/S254T/T256E (YTE) reduced its ADCC activity and its binding to human FcγRIIIA (F158 allotype). The ADCC activity of MEDI-522-YTE can be restored, and increased in comparison to unmodified MEDI-522, by introduction of the ADCC-enhancing replacements S239D/A330L/I332E (by EU numbering), indicating that the replacements YTE provide a reversible mechanism to modulate the ADCC function of a human IgG1 (see, e.g., Dall'Acqua et al. (2006) J. Biol. Chem. 281(33):23514-23524).

[0933] Residues at positions 250, 314 and 428 (by EU numbering) of the human IgG heavy chain, which are conserved among all four human IgG subtypes, also are located near the Fc-FcRn interface. The mutations T250Q, M428L and T250Q/M428L, when introduced into the Fc of a human IgG2 mAb, resulted in an increase in binding to FcRn at pH 6.0 of ˜3-, 7- and 28-fold, respectively, with no binding observed at pH 7.5. When the pharmacokinetics of the mutants were evaluated in rhesus monkeys, it was found that the mean clearance, i.e., the volume of serum antibody cleared per unit of time, was ˜1.8-fold lower for the M428L mutant, and ˜2.8-fold lower for the T250Q/M428L mutant, while the elimination half-life was ˜1.8-fold longer for the M428L mutant and ˜1.9-fold longer for the T250Q/M428L mutant, compared to unmodified antibody. Since these residues are conserved among IgG subtypes, the mutations M428L and T250Q/M428L are expected to have similar effects in human IgG1, IgG3 and IgG4 antibodies (see, e.g., Hinton et al. (2004) J. Biol. Chem. 279(8):6213-6216). The modifications T250R/M428L were shown to result in selective binding to FcRn at pH 6.0, and a 2.8-fold decreased degradation of serum IgG2 and IgG1 in rhesus monkeys (see, e.g., Saxena et al. (2016) Front. Immunol. 7:580).

[0934] The mutation N434A (by EU numbering), when introduced into the human anti-HER2 IgG1 trastuzumab, resulted in ˜4-fold higher affinity towards human FcRn over unmodified antibody at pH 6, but negligible binding at pH 7.4. The N434A variant had increased exposure, decreased clearance (˜2-fold) and increased half-life (˜2-fold) compared to the wild-type antibody when tested in vivo in cynomolgus monkeys. In contrast, the mutation N434W, which resulted in ˜80-fold increased binding to FcRn at pH 6, exhibited a clearance rate similar to wild-type; this mutant also exhibited significant binding to FcRn at pH 7.4, indicating that maintaining pH-dependent binding of Fc mutants to FcRn is critical for improving the in vivo pharmacokinetics (Yeung et al. (2009) J. Immunol. 182:7663-7671). The N434A mutation also counters the poor FcRn affinity that can result from the introduction of mutations that increase binding to FcγRs; N434A is typically added to the mutations S298A/E333A/K333A to create a variant with enhanced FcγR binding and normal or improved FcRn binding. Fc mutations that improve FcRn binding also include N434Y, E294del/T307P/N434Y and T256N/A378V/S383N/N434Y. The E294 deletion results in higher sialylation of the N297 glycan on the Fc, which increases antibody half-life in vivo. Indicating that sialylation also plays a role in regulating serum half-life (see, e.g., Saunders, K. O. (2019) Front. Immunol. 10:1296).

[0935] The replacements M428L/N434S (by EU numbering), when introduced into the humanized anti-VEGF IgG1 antibody bevacizumab (Avastin®), resulted in an 11-fold increase in affinity to FcRn at pH 6.0, and extended the in vivo serum half-life in cynomolgus monkeys from 9.7 days to 31.1 days, representing a 3.2-fold improvement. The M428L/N434S modification resulted in similar increases in FcRn binding and half-life extension when introduced into the anti-EGFR antibody cetuximab, which is rapidly cleared due to receptor-mediated internalization. The half-life extension of these anti-tumor antibodies correlated with enhanced tumor reduction in vivo in a mouse model, indicating that the in vivo therapeutic efficacy of the antibodies is increased when the pharmacokinetics, such as clearance rate, are improved. Other mutations engineered into the bevacizumab Fc include (by EU numbering): N434S, with ˜3-fold improvement in FcRn binding and ˜2.8 fold increase in serum half-life in mice; V259I/V308F, with ˜6-fold improvement in FcRn binding, and ˜3-fold and ˜2-fold increases in serum half-life in mice and cynomolgus monkeys, respectively; M252Y/S254T/T256E, with ˜7-fold improvement in FcRn binding, and ˜4-fold and 2.5-fold increases in serum half-life in mice and cynomolgus monkeys, respectively; and V259I/V308F/M428L, with ˜20-fold improvement in FcRn binding, and ˜4-5-fold and 2.6-fold increases in serum half-life in mice and cynomolgus monkeys, respectively (Zalevsky et al. (2010) Nat. Biotechnol. 28(2):157-159).

[0936] The above-identified mutations, and other such mutations, can be introduced into the IgG Fc region in constructs provided herein. These include constructs, such as those of Formulae 1 and 2, in which the linker includes an Fc or an Fc dimer, depending upon the structure of the construct.

[0937] In some embodiments, the IgG Fc regions in constructs herein, such bispecific TNFR1 antagonist/TNFR2 agonist constructs, and the TNFR1 antagonist constructs provided herein are modified to enhance neonatal FcR recycling to increase in vivo half-life. This can be effected by mutating residues at the interface of the C_{H}2 and C_{H}3 domains of IgG Fc, which are responsible for binding to FcRn. These include, but are not limited to, the residues T250, L251, M252, I253, S254, T256, V259, T307, V308, L309, H310, L314, Q311, A378, E380, S383, M428, H433, N434, H435 and Y436, by EU numbering. Exemplary Fc modifications that increase binding to FcRn include, but are not limited to, one or more of T250Q, T250R, M252F, M252W, M252Y, S254T, T256D, T256E, T256Q, V259I, V308F, E380A, M428L, H433K, N434F, N434A, N434W, N434S, N434Y, Y436H, M252Y/T256Q, M252F/T256D, M252Y/S254T/T256E, H433K/N434F/Y436H, N434F/Y436H, T250Q/M428L, T250R/M428L, M428L/N434S, V259I/V308F, V259I/V308F/M428L, E294del/T307P/N434Y, T256N/A378V/S383N/N434Y, and combinations thereof, by EU numbering. Table 7, below, shows the corresponding mutations by Kabat numbering and sequential numbering, with reference to the sequence of the IgG1 heavy chain constant domain set forth in SEQ ID NO:9. Other modifications, known in the art to confer enhanced or increased FcRn binding also are contemplated for use herein.

TABLE 7
IgG1 Fc Modifications that Enhance FcRn Binding

| | | Modifications by |
|---|---|---|
| Modifications by EU | Modifications by Kabat | Sequential Numbering |
| Numbering | Numbering | (SEQ ID NO: 9) |
| T250Q | T263Q | T133Q |
| T250R | T263R | T133R |
| M252F | M265F | M135F |
| M252W | M265W | M135W |
| M252Y | M265Y | M135Y |
| S254T | S267T | S137T |
| T256D | T269D | T139D |
| T256E | T269E | T139E |
| T256Q | T269Q | T139Q |
| V259I | V272I | V142I |
| V308F | V327F | V191F |
| E380A | E405A | E263A |
| M428L | M459L | M311L |
| H433K | H464K | H316K |
| N434F | N465F | N317F |
| N434A | N465A | N317A |
| N434W | N465W | N317W |
| N434S | N465S | N317S |
| N434Y | N465Y | N317Y |
| Y436H | Y467H | Y319H |
| M252Y/T256Q | M265Y/T269Q | M135Y/T139Q |
| M252F/T256D | M265F/T269D | M135F/T139D |
| M252Y/S254T/T256E | M265Y/S267T/T269E | M135Y/S137T/T139E |
| H433K/N434F/Y436H | H464K/N465F/Y467H | H316K/N317F/Y319H |
| N434F/Y436H | N465F/Y467H | N317F/Y319H |
| T250Q/M428L | T263Q/M459L | T133Q/M311L |
| T250R/M428L | T263R/M459L | T133R/M311L |
| M428L/N434S | M459L/N465S | M311L/N317S |
| V259I/V308F | V272I/V327F | V142I/V191F |
| V259I/V308F/M428L | V272I/V327F/M459L | V142I/V191F/M311L |
| E294del/T307P/N434Y | E311del/T326P/N465Y | E177del/T190P/N317Y |
| T256N/A378V/S383N/ | T269N/A401V/S408N/ | T139N/A261V/S266N/ |
| N434Y | N465Y | N317Y |

[0938] c) Enhancement of or Reduction/Elimination of Fc Immune Effector Functions

[0939] There are four human IgG subclasses that differ in effector functions, circulating half-life and stability. IgG1 has Fc effector functions, is the most abundant IgG subclass, and is the most commonly used subclass in FDA-approved therapeutic proteins. IgG2 is deficient in Fc effector functions, but dimerizes with other IgG2 molecules, and is unstable due to scrambling of disulfide bonds in the hinge region. IgG3 has Fc effector functions, and a very long, rigid hinge region. IgG4 is deficient in Fc effector functions, has a shorter circulating half-life than the other subclasses, and the IgG4 dimer is biochemically unstable due to the presence of a single disulfide bond in the hinge region, which leads to the exchange of H chains between different IgG4 molecules. Thus, Fc regions from IgG2 and IgG4 do not possess effector functions, and can be used in instances where effector functions are not required or would be detrimental, for example, in the context of autoimmune and inflammatory diseases and disorders.

[0940] Most approved therapeutic mAbs belong to the human IgG1 subclass, and can interact with the humoral and cellular components of the immune system. For example, antibodies engage the humoral immune response via interaction with complement protein C1q, which initiates the complement cascade, resulting in the formation of the membrane attack complex which induces cytolysis in the target cell (i.e., complement-dependent cytotoxicity (CDC)), and engage the cellular immune response by interaction with Fc gamma receptors (FcγRs). The FcγRs include the FcγRI (CD64), FcγRII (CD32) and FcγRIII (CD16) classes that differ in their cell surface expression and Fc binding affinities. The five activating FcγRs include the high affinity FcγRI that can bind monovalent antibodies, and the lower affinity FcγRIIa, FcγRIIc, FcγRIIIa and FcγRIIIb, which require avidity-based interactions. FcγRIIb is the only inhibitory receptor. Upon binding of an Fc to an activating receptor, intracellular signaling pathways, modulated through the phosphorylation of immunoreceptor tyrosine-based activation motifs (ITAMs), result in effector functions, such as antibody-dependent cell-mediated cytotoxicity (ADCC; also called antibody-dependent cellular cytotoxicity) and antibody-dependent cell-mediated phagocytosis (ADCP; also called antibody-dependent cellular phagocytosis), as well as inflammation due to the induction of cytokine secretion. Signaling via the inhibitory FcγRIIb, which is modulated through the phosphorylation of immunoreceptor tyrosine-based inhibitory motifs (ITIMs), recruits phosphatases that counter-balance the activating signaling pathways (see, e.g., Wang et al. (2018) Protein Cell 9(1):63-73).

[0941] The hinge and proximal C_{H}2 amino acid sequence (lower hinge-upper C_{H}2 domain region), and glycosylation of the conserved N297 residue (by EU numbering) in the C_{H}2 domain Asn-X-Ser/Thr glycosylation motif of the Fc region, mediate the interactions of antibodies with FcγRs and complement protein C1q. Antibody/Fc engineering has been used to modify the immune effector functions of antibodies by altering their binding to C1q and various Fcγ receptors. The CDC, ADCC and ADCP activities of therapeutic mAbs can thus be increased or decreased, depending on the application. For example, the efficacy of anti-cancer mAbs depends in part on their induction of FcγR effector functions. The effector function includes the activation of natural killer (NK) cells via FcγRIIIa and the subsequent ADCC activity and release of inflammatory cytokines, the induction of macrophage-mediated ADCP via interactions with multiple FcγRs, and the recruitment and activation of other immune cells, such as neutrophils, the primary receptor for NK cell-mediated ADCC. FcγRIIIa has two polymorphic variants: one with V158, which has a higher affinity for IgG1; and one with F158, with a lower affinity for IgG1. Cancer patients with the high affinity V158 polymorphism can have better outcomes following treatment with cetuximab, trastuzumab and rituximab, compared to patients with the low affinity F158 polymorphism. Results such as these highlight the role that FcγR-mediated immune effector functions play in therapies, and indicate that engineering antibodies and related molecules to have increased affinity to FcγRs can enhance the therapeutic efficacy (see, e.g., Wang et al. (2018) Protein Cell 9(1):63-73).

[0942] Residues in the lower hinge and proximal CH2 regions of IgGs have been determined to be critical for binding to FcγRs. Residues that are within 5 angstroms from the FcγR:Fc interface for FcγRI, FcγRIIa, FcγRIIb and FcγRIIIb, include the residues (by EU numbering) P232, E233, L234, L235, G236, G237, P238, S239 (corresponding to residues P115-S122, with reference to SEQ ID NO:9), D265, V266, S267, H268, E269, D270 (corresponding to residues D148-D153, with reference to SEQ ID NO:9), Y296, N297, S298, T299 (corresponding to residues Y179-T182, with reference to SEQ ID NO:9), and N325, K326, A327, L328, P329, A330, P331 and I332 (corresponding to residues N208-I215, with reference to SEQ ID NO:9) (see, e.g., Wang et al. (2018) Protein Cell 9(1):63-73).

[0943] Modifications of Fc that enhance or decrease ADCC activity and/or enhance affinity/binding to receptors are known to those of skill in the art. For example, Fc modifications that increase the IgG1 affinity for and binding to FcγRIIIa, and/or enhance ADCC function, include the replacements (by EU numbering): F243L/R292P/Y300L/V305I/P396L, L235V/F243L/R292P/Y300L/P396L, F243L/R292P/Y300L, S239D, I332E, S239D/I332E, S239D/A330L/I332E, S298A/E333A/K334A, and the combinations of L234Y/L235Q/G236W/S239M/H268D/D270E/S298A in one heavy chain and D270E/K326D/A330M/K334E in the opposing heavy chain, and L234Y/G236W/S298A in one heavy chain and S239D/A330L/I332E in the opposing heavy chain. Additionally, the mutations A327Q/P329A (interact with FcγRI), D265A/S267A/H268A/D270A/K326A/S337A (interact with FcγRIIa), G236A (interacts with FcγRIIa), and T256A/K290A/S298A/E333A/K334A (interact with FcγRIIIa), result in high affinity interactions with FcγRs.

[0944] Fc modifications that increase binding to FcγRIIa and FcγRIIIa, and enhance ADCC and ADCP, include (by EU numbering) G236A/I332E, G236A/S239D/I332E (also increases binding to FcγRI), and G236A/S239D/A330L/I332E (see, e.g., Wang et al. (2018) Protein Cell 9(1):63-73; Saxena et al (2016) Front. Immunol. 7:580; and Saunders, K. O. (2019) Front. Immunol. 10:1296).

[0945] Glyco-engineering of IgGs, which contain a conserved N-linked glycosylation site at residue N297 in the C_{H}2 domain, can enhance Fc effector function. Glycosylation of N297 is essential for maintaining Fc conformation and mediating its interactions with FcγRs (and C1q). The glycan present at residue N297 typically has two N-acetylglucosamine (GlcNAc), three mannose, and two more GlcNAc linked to the mannose, to form a biantennary complex glycan. Additional fucose, galactose, sialic acid and GlcNAc can be added to the core glycan structure. IgGs found circulating in human sera generally are fucosylated, but recombinant IgG production can alter the glycan composition by expressing the antibody in plant cells, knocking in or out specific glycosidases, or in vitro enzymatic digestion of the glycosylated IgG; because both heavy chains are glycosylated, a single IgG molecule can have glycan heterogeneity. The glycan directly affects FcγR binding. For example, the N297 glycan on the Fc can clash with glycans on the FcγRIII protein, resulting in poor engagement of effector cells that mediate ADCC. Fc regions containing different glycans at N297 adopt different hinge region conformations, which can affect the Fc's ability to interact with FcγRs. Expression of β(1,4)-N-acetylglucosaminyltransferase III when expressing IgG generates an antibody that is glycosylated at position N297 with a biantennary glycan; this antibody has increased binding to FcγRIIIa and enhanced ADCC activity. It has been demonstrated that fucose deficient (afucosylated/non-fucosylated) IgG1s exhibit up to 50-fold increased binding to FcγRIIIa and enhanced ADCC activity. Two glyco-engineered (afucosylated) mAbs, obinutuzumab (anti-CD20) and mogamulizumab (anti-CCR4) have been approved for clinical use, indicating the potential for glyco-engineering for enhanced effector function, and its translation into clinically approved therapeutics (see, e.g., Wang et al. (2018) Protein Cell 9(1):63-73; Saxena et al. (2016) Front. Immunol. 7:580; and Saunders, K. O. (2019) Front. Immunol. 10:1296).

[0946] The Fc also can be modified to bind with a wider range of Fc receptors. Fc receptors for isotypes other than gamma (i.e., IgA, IgM and IgE) exist on certain leukocytes, and by modifying an Fc region to engage with multiple Fc receptors, an antibody with expanded abilities to engage effector cells is created. Neutrophils, which are the most abundant leukocytes in the body, engage the Fc of IgA antibodies via the FcαRI receptor. For example, to engage FcγRs and FcαRI, single domains of IgA2 were added to the end of the IgG1 constant region, creating a four domain constant region, CH1g-CH2g-CH3g-CH3a. The C_{H}1 domain of IgG1 was replaced with the alpha 1 constant region domain, generating a constant region (CH1a-CH2g-CH3g-CH3a) that is closer in structure to the alpha constant region. These four-domain, cross-isotype IgGA chimeric antibodies bound to J chain similarly to natural IgA2, had reduced transport by polymeric Ig receptor, had a 3-5-fold decrease in FcγRI affinity, and the short serum half-life of IgA2 instead of the protracted serum circulation of IgG1. The four-domain, cross-isotype IgGA chimeric antibodies, however, had the ability to mediate complement-dependent lysis of sheep red blood cells and were more pH-resistant than IgG1. Another cross-isotype Fc was created by fusing the gamma 1 and alpha constant regions together to create a tandem G1-A Fc region, in which the hinge, C_{H}2 and C_{H}3 domains of IgA2 were fused to the C-terminus of IgG1. This tandem cross-isotype IgG/IgA fusion showed similar expression levels, antigen binding and thermostability as IgG1, and, in vitro, bound to FcαRI and FcγRI, FcγRII, FcγRIIIa and FcRn, with affinities similar to wild-type IgA and IgG, respectively. The binding to various FcRs resulted in ADCC activity with polymorphonuclear cells and NK cells; C1q binding, however, was reduced 3-fold compared to IgG1. The tandem IgG/IgA had an in vivo half-life similar to that of IgG1 in BALB/c mice. An alternative cross-isotype antibody was created by replacing the C_{H}3 domain and C_{H}2 α1 loop residues 245-258 (by EU numbering, corresponding to the sequence PKPKDTLMISRTPE; (residues 128-141 of SEQ ID NO:9)) of the IgG1 constant region, with the structurally analogous regions of the IgA constant region. This chimeric Fc was able to bind FcγRI, FcγRIIa and FcαRI, and antibodies containing the chimeric Fc mediated ADCC with polymorphonuclear cells and ADCP with macrophages, and activated complement, but lacked binding to FcRn, which regulates antibody half-life; thus, further optimization is required for effective in vivo use (see, e.g., Saunders, K. O. (2019) Front. Immunol. 10:1296).

[0947] Another approach to enhance FcγR binding is the multimerization of IgG, which has shown promise in the treatment of autoimmune diseases. The IgG multimers are generated, for example, by adding heterologous multimerization domains such as isoleucine zippers, or by adding another hinge region at the N-terminus of the natural hinge, or by adding another hinge region at the C-terminus of the C_{H}3 domain. IgG hexamers are created by appending the IgM tailpiece to the C-terminus of the IgG1 Fc and creating a cysteine bond at position 309; this multimeric IgG bound strongly to FcγRI, FcγRIIa and FcγRIIIa, and weakly to FcγRIIb and FcγRIIIb. The various multimeric IgGs have increased binding to FcγRI, FcγRIIb and FcγRIII, compared to monomeric IgG, and have shown promise in preclinical models of arthritis, neuropathy, and autoimmune myasthenia gravis. This multimeric IgG design is being further optimized to fine-tune which immune receptors, including FcRn, can bind to the multimer (see, e.g., Saunders, K. O. (2019) Front. Immunol. 10:1296).

[0948] Residues in the Fc region of IgG that are involved in the interaction with and binding to C1q (and hence, CDC) include (by EU numbering) S267, D270, K322, K326, P329, P331 and E333. Fc modifications that have been shown to enhance CDC by increasing C1q binding include, for example, K326A, E333A, K326A/E333A, K326W, K326W/E333S, K326M/E333S, C220D/D221C, H268F/S324T, S267E, H268F, S324T, S267E/H268F/S324T, and G236A/I332E/S267E/H268F/S324T (all by EU numbering). In the upper hinge region of the IgG1 Fc, substituting Trp, in various combinations, at positions 222, 223 and 224 (i.e., K222W, T223W, and H224W, by EU numbering), increased C1q binding and CDC activity relative to wild-type IgG1 without affecting FcγRIIIa binding and ADCC activity. Specifically, the mutations included K222W/T223W, K222W/T223W/H224W and D221W/K222W. The mutations C220D/D221C and C220D/D221C/K222W/T223W, also increased C1q binding and CDC activity (see, e.g., Wang et al. (2018) Protein Cell 9(1):63-73; Saxen et al. (2016) Front. Immunol. 7:580; Saunders, K. O. (2019) Front. Immunol. 10:1296; and Dall'Acqua et al. (2006) J. Immunol. 177:1129-1138).

[0949] IgG3 has the best in vitro binding to C1q; combining the C_{H}1 and hinge regions of IgG1 with the C_{H}2 and C_{H}3 regions of IgG3 (to retain ADCC activity from IgG1 and CDC activity from IgG3), creating IgG1/IgG3 cross-subtype antibodies, also increases C1q binding and enhances CDC activity. Another IgG1/IgG3 cross-subtype antibody with increased C1q binding and enhanced CDC activity includes the C_{H}1, hinge and C_{H}3 of IgG1, and the C_{H}2 of IgG3; these modifications allow for increased Cq1 binding since C1q binds the C_{H}2 domain, as well as easy purification, since protein A binds the C_{H}3 domain. Additionally, the modifications E345R/E430G/S440Y, which result in the formation of IgG hexamers with K322 oriented in a position to favorably interact with the hexameric C1q headpiece, enhanced CDC activity. The mutation E345R alone also results in IgG hexamer formation, with increased C1q binding and enhanced CDC activity (see, e.g., Wang et al. (2018) Protein Cell 9(1):63-73; Saxena et al. (2016) Front. Immunol. 7:580; Saunders, K. O. (2019) Front. Immunol. 10:1296).

[0950] Glycoengineering also can be used to improve complement binding; the N297 glycan within the C_{H}2 domain of the Fc can be modified to improve CDC activity. For example, an overabundance of galactosylation in the IgG1 Fc increases C1q binding and CDC activity compared to the unmodified glycoform of IgG1, and also improves thermostability. Thus, galactosylating the Fc can be used to generate a stable biologic with enhanced CDC activity (see, e.g., Saunders (2019) Front. Immunol. 10:1296).

[0951] Table 8, below, summarizes the Fc modifications that increase binding to FcγRs or C1q, and thus, enhance immune effector functions, including ADCC, ADCP and CDC, and provides the corresponding modifications by Kabat numbering and by sequential numbering, with reference to the sequence of the IgG1 heavy chain constant domain set forth in SEQ ID NO:9. Any one or more of these modifications, alone or in various combinations, can be introduced into the IgG1 Fc portions of the constructs provided herein. Other modifications, known in the art to confer enhanced or increased immune effector functions, also are contemplated for use herein.

TABLE 8
IgG1 Fc Modifications that Enhance Immune Effector Functions

| | | Modifications | |
|---|---|---|---|
| Modifications | Modifications | by Sequential | |
| by EU | by Kabat | Numbering | |
| Numbering | Numbering | (SEQ ID NO: 9) | Effects |
| S239D | S252D | S122D | Increase binding to |
| | | | FcγRIIIa; enhance |
| | | | ADCC |
| I332E | I351E | I215E | Increase binding to |
| | | | FcγRIIIa; enhance |
| | | | ADCC |
| S239D/I332E | S252D/I351E | S122D/I215E | Increase binding to |
| | | | FcγRIIIa; enhance |
| | | | ADCC |
| S239D/A330L/ | S252D/A349L/ | S122D/A213L/ | Increase binding to |
| I332E | I351E | I215E | FcγRIIIa; enhance |
| | | | ADCC |
| S298A/E333A/ | S317A/E352A/ | S181A/E216A/ | Increase binding to |
| K334A | K353A | K217A | FcγRIIIa; enhance |
| | | | ADCC |
| F243L/R292P/ | F256L/R309P/ | F126L/R175P/ | Increase binding to |
| Y300L/V305I/ | Y319L/V324I/ | Y183L/V188I/ | FcγRIIIa and |
| P396L | P424L | P279L | FcγRIIa; enhance |
| | | | ADCC |
| L235V/F243L/ | L248V/F256L/ | L118V/F126L/ | Increase binding to |
| R292P/Y300L/ | R309P/Y319L/ | R175P/Y183L/ | FcγRIIIa; enhance |
| P396L | P424L | P279L | ADCC |
| F243L/R292P/ | F256L/R309P/ | F126L/R175P/ | Increase binding to |
| Y300L | Y319L | Y183L | FcγRIIIa; enhance |
| | | | ADCC |
| L234Y/G236W/ | L247Y/G249W/ | L117Y/G119A/ | Increase binding to |
| S298A | S317A | S181A | FcγRIIIa; enhance |
| (1^{st} heavy chain) | (1^{st} heavy chain) | (1^{st} heavy chain) | ADCC |
| and S239D/ | and S252D/ | and S122D/ | |
| A330L/I332E | A349L/I351E | A213L/I215E | |
| (2^{nd} heavy | (2^{nd} heavy | (2^{nd} heavy | |
| chain) | chain) | chain) | |
| L234Y/L235Q/ | L247Y/L248Q/ | L117Y/L118Q/ | Increase binding to |
| G236W/ | G249W/ | G119W/ | FcγRIIIa; enhance |
| S239M/H268D/ | S252M/H281D/ | S122M/H151D/ | ADCC |
| D270E/S298A | D283E/S317A | D153E/S181A | |
| (1^{st} heavy chain) | (1^{st} heavy chain) | (1^{st} heavy chain) | |
| and D270E/ | and D283E/ | and D153E/ | |
| K326D/A330M/ | K345D/A349M/ | K209D/A213M/ | |
| K334E | K353E | K217E | |
| (2^{nd} heavy | (2^{nd} heavy | (2^{nd} heavy | |
| chain) | chain) | chain) | |
| A327Q/P329A | A346Q/P348A | A210Q/P212A | Increase binding to |
| | | | FcγRI |
| D265A/S267A/ | D278A/S280A/ | D148A/S150A/ | Increase binding to |
| H268A/D270A/ | H281A/D283A/ | H151A/D153A/ | FcγRIIa |
| K326A/S337A | K345A/S357A | K345A/S220A | |
| T256A/K290A/ | T269A/K307A/ | T139A/K173A/ | Increase binding to |
| S298A/E333A/ | S317A/E352A/ | S181A/E216A/ | FcγRIIIa |
| K334A | K353A | K217A | |
| G236A | G249A | G119A | Increase binding to |
| | | | FcγRIIa; enhances |
| | | | ADCP |
| G236A/I332E | G249A/I351E | G119A/I215E | Increase binding to |
| | | | FcγRIIa and |
| | | | FcγRIIIa; enhance |
| | | | ADCC and ADCP |
| G236A/S239D/ | G249A/S252D/ | G119A/S122D/ | Increase binding to |
| I332E | I351E | I215E | FcγRI, FcγRIIa and |
| | | | FcγRIIIa; enhance |
| | | | ADCC and ADCP |
| G236A/S239D/ | G249A/S252D/ | G119A/S122D/ | Increase binding to |
| A330L/I332E | A349L/I351E | A213L/I215E | FcγRIIa and |
| | | | FcγRIIIa; enhance |
| | | | ADCC and ADCP |
| Biantennary | Biantennary | Biantennary | Increases binding |
| glycan | glycan | glycan | to FcγRIIIa; |
| at N297 | at N314 | at N180 | enhances ADCC |
| Afucosylated | Afucosylated | Afucosylated | Increases binding |
| glycan | glycan | glycan | to FcγRIIIa; |
| at N297 | at N314 | at N180 | enhances ADCC |
| K326W | K345W | K209W | Increase binding to |
| | | | C1q; enhance CDC |
| K326A | K345A | K209A | Increase binding to |
| | | | C1q; enhance CDC |
| E333A | E352A | E216A | Increase binding to |
| | | | C1q; enhance CDC |
| K326A/E333A | K345A/E352A | K209A/E216A | Increase binding to |
| | | | C1q; enhance CDC |
| | | | and preserve |
| | | | ADCC activity |
| K326W/E333S | K345W/E352S | K209W/E216S | Increase binding to |
| | | | C1q; enhance CDC |
| K326M/E333S | K345M/E352S | K209M/E216S | Increase binding to |
| | | | C1q; enhance CDC |
| | | | and preserve |
| | | | ADCC activity |
| K222W/T223W | K235W/T236W | K105W/T106W | Increase binding to |
| | | | C1q; enhance CDC |
| K222W/ | K235W/ | K105W/ | Increase binding to |
| T223W/ | T236W/ | T106W/ | C1q; enhance CDC |
| H224W | H237W | H107W | |
| D221W/K222W | D234W/K235W | D104W/K105K | Increase binding to |
| | | | C1q; enhance CDC |
| C220D/D221C | C233D/D234C | C103D/D104C | Increase binding to |
| | | | C1q; enhance CDC |
| | | | and preserve |
| | | | ADCC activity |
| C220D/D221C/ | C233D/D234C/ | C103D/D104C/ | Increase binding to |
| K222W/T223W | K235W/T236W | K105W/T106W | C1q; enhance CDC |
| H268F/S324T | H281F/S343T | H151F/S207T | Increase binding to |
| | | | C1q; enhance CDC |
| S267E | S280E | S150E | Increase binding to |
| | | | C1q; enhance CDC |
| H268F | H281F | H151F | Increase binding to |
| | | | C1q; enhance CDC |
| S324T | S343T | S207T | Increase binding to |
| | | | C1q; enhance CDC |
| S267E/H268F/ | S280E/H281F/ | S150E/H151F/ | Increase binding to |
| S324T | S343T | S207T | C1q; enhance CDC |
| G236A/I332E/ | G249A/I351E/ | G119A/I215E/ | Increase binding to |
| S267E/H268F/ | S280E/H281F/ | S150E/H151F/ | C1q; enhance CDC |
| S324T | S343T | S207T | |
| E345R | E366R | E228R | Increase binding to |
| | | | C1q; enhance |
| | | | CDC; IgG1 |
| | | | hexamer |
| | | | formation |
| E345R/E430G/ | E366R/E461G/ | E228R/E313G/ | Increase binding to |
| S440Y | S471Y | S323Y | C1q; enhance |
| | | | CDC; IgG1 |
| | | | hexamer |
| | | | formation |

[0952] Therapeutic antibodies also can be engineered to reduce or eliminate immune effector functions. For purposes herein, in some embodiments, it of interest, for example, to reduce or eliminate ADCC activity. Constructs herein that include Fc generally are modified to reduce or eliminate ADCC activity.

[0953] It is of interest to reduce or eliminate immune effector functions, for example, where: the therapeutic antibodies are antagonistic in order to prevent receptor-ligand interactions and signaling; the antibodies are receptor agonists to crosslink receptors and induce signaling; the antibodies are drug delivery vehicles that deliver a drug to antigen-expressing target cells; and, where the reduction or elimination of effector functions prevents target cell death or unwanted cytokine secretion. Reduced effector function also prevents antibody-drug conjugates from interacting with FcγRs, which reduces off-target cytotoxicity. The importance of reducing or eliminating effector functions became evident following adverse events associated with the administration of the first approved mAb, muromonab, which was designed to prevent T cell activation in transplant patients receiving a donor kidney, lung or heart. Patients administered muromonab experienced a dangerous induction of pro-inflammatory cytokines (i.e., a cytokine storm); this was due, in part, to the interaction of muromonab with FcγRs (see, e.g., Wang et al. (2018) Protein Cell 9(1):63-73; and Saunders, K. O. (2019) Front. Immunol. 10:1296).

[0954] There are many known mutations that reduce or eliminate receptor function. For example, replacements L235E and F234A/L235A in human IgG4, and L235E and L234A/L235A (all by EU numbering) in human IgG1 reduce FcγR and C1q binding, and reduce effector functions, such as inflammatory cytokine release. Inflammatory cytokine release from therapeutic antibodies, can result in adverse effects. The replacements S228P/L235E, when introduced into IgG4, also reduce binding to FcγRs; the S228P mutation improves stability of IgG4. The mutations S228P/F234A/L235A in the IgG4 Fc decrease binding to FcγRI, IIa and IIIa, and reduce ADCC and CDC. The triple mutant L234E/L235F/P331S in IgG1 Fc decreases binding to FcγRI, FcγRII, FcγRIII and C1q, and reduces CDC, the mutations L234A/L235A/P329G in the IgG1 Fc eliminate FcγRI, FcγRII, FcγRIII and C1q binding, and reduce ADCP. The mutations L234F/L235E/P331S also reduce binding to FcγRs and C1q, and reduce effector functions of the IgG1 Fc. The mutations G237A and E318A in the IgG1 Fc each decrease binding to FcγRII and reduce ADCP; the mutations D265A and E233P decrease binding to FcγRI, FcγRII and FcγRIII, and decrease ADCC and ADCP, and the mutations G236R/L328R decrease binding to all FcγRs and reduce ADCC. Crystal structure data revealed that conformational changes at residue P329, which packs between two conserved tryptophan residues that occur in all FcγRs, form a “proline sandwich,” can be detrimental to the interaction with FcγRs, and that modifications at residue D270 can negatively impact interactions with C1q (see, e.g., Wang et al. (2018) Protein Cell 9(1):63-73; Saunders, K. O. (2019) Front. Immunol. 10:1296; International Application Publication No. WO 2019/226750).

[0955] Induction of the complement cascade is associated with antibody injection site adverse reactions, and eliminating C1q binding to Fc, which is the initial even in the activation of CDC. Modification of Fc region eliminate C1q binding can be used to eliminate CDC in constructs containing Fc regions. Many of the mutations that eliminate FcγR binding also eliminate C1q binding, as shown above. For example, the mutation A330L disrupts C1q binding and reduces CDC, and also eliminates FcγRIIb binding. The mutations D270A, P329A, K322A and P331A also result in reduced C1q binding and reduced CDC activity (see, e.g., Saunders, K. O. (2019) Front. Immunol. 10:1296).

[0956] Glyco-engineering can be used to ablate FcγR and C1q binding. As discussed elsewhere herein, the glycan at residue N297 is a complex biantennary glycan. Modification of this glycan to a high mannose glycan (i.e., high mannose glycosylation) reduces the affinity of IgG1 Fc for C1q and reduces CDC activity. Mutations in the Fc that reduce or eliminate C1q and FcγRI binding also can result in an increase in galactosylation and sialylation of the N297 glycan; such mutations include F241A, V264A and D265A, for example. The mutations N297A, N297Q, N297D and N297G, by EU numbering, remove the glycosylation site at N297 and reduce effector functions, such as CDC and ADCC, by abrogating Fc interactions with C1q and FcγRs, respectively. The combination N297G/D265A almost completely abrogates binding to FcγRs and C1q. An IgG3 Fc lacking glycosylation (the aglycone Fc) has reduced binding to FcγRI and C1q. (see, e.g., Wang et al. (2018) Protein Cell 9(1):63-73; Saunders, K. O. (2019) Front. Immunol. 10:1296).

[0957] To reduce or eliminate Fc effector functions, large portions of Fc regions from different subclasses, that lack opposing functions, can be exchanged to generate cross-subclass Fc regions. For example, IgG2 has poor FcγR binding but binds C1q, and IgG4 lacks C1q binding but reacts with FcγRs; thus, combinations of IgG2 and IgG4 CH domains that are devoid of both C1q and FcγR binding, can be constructed. In general, in IgG1/IgG4 chimeras, the hinge and C_{H}1 domain is from IgG2, and the C_{H}2 and C_{H}3 domains are from IgG4. Since IgG1 and IgG3 recruit complement more effectively than IgG2 and IgG4, and because IgG2 and IgG4 are limited in their ability to induce ADCC, a cross-subclass approach can reduce effector function. For example, the anti-C5 mAb eculizumab, contains IgG2 residues 118-260 (by EU numbering; corresponding to residues 114-273 by Kabat numbering, and residues 1-139 with reference to SEQ ID NO:11), and IgG4 residues 261-447 (by EU numbering; corresponding to residues 274-478 by Kabat numbering, and residues 141-327 with reference to SEQ ID NO:15), and has limited or undetectable effector function. Similarly, an IgG2 variant (IgG2m4) with the point mutations H268Q/V309L/A330S/P331S from IgG4 (by EU numbering; corresponding to H281Q/V328L/A349S/P350S by Kabat numbering, and H147Q/V188L/A209S/P210S with reference to SEQ ID NO:11) lacks binding to all FcγRs and C1q and exhibits reduced effector functions. A variant (called IgG2σ) containing the IgG2 to IgG4 cross-subclass mutations V309L/A330S/P331S (by EU numbering; corresponding to V328L/A349S/P350S by Kabat numbering, and V188L/A209S/P210S with reference to SEQ ID NO:11), and the non-germline mutations V234A/G237A/P238S/H268A (by EU numbering; corresponding to V247A/G250A/P251S/H281A by Kabat numbering, and V114A/G116A/P117S/H147A with reference to SEQ ID NO:11), eliminates binding to FcγRs and C1q and exhibit undetectable CDC, ADCC and ADCP activities. The IgG1/IgG4 cross-subclass variant IgG1σ, which includes the mutations L234A/L235A/G237A/P238S/H268A/A330S/P331S, lacks binding to FcγRI and IIIa, and has very weak binding to FcγRIIa and IIb at high concentrations of antibody, resulting in reduced ADCC and CDC activities (see, e.g., Wang et al. (2018) Protein Cell 9(1):63-73; Saunders, K. O. (2019) Front. Immunol. 10:1296).

[0958] Tables 9 and 10, below, summarize some IgG1 and IgG4 Fc modifications that reduce or eliminate binding to FcγRs and/or C1q, and thus, reduce or eliminate immune effector functions, including ADCC, ADCP and CDC, which can be introduced into the Fc regions in constructs herein. The tables provide the corresponding modifications by Kabat numbering and by sequential numbering, with reference to the sequence of the IgG1 heavy chain constant domain set forth in SEQ ID NO:9, or the IgG4 heavy chain constant domain set forth in SEQ ID NO:15. Any one or more of these modifications, alone or in various combinations, can be introduced into the IgG1 Fc portions of the constructs provided herein. Other modifications, known in the art to reduce or eliminate immune effector functions, also are contemplated for use herein.

TABLE 9
IgG1 Fc Modifications that Reduce or Eliminate
Immune Effector Functions

| | | Modifications | |
|---|---|---|---|
| | | by Sequential | |
| Modifications | Modifications | Numbering | |
| by EU | by Kabat | (SEQ ID | |
| Numbering | Numbering | NO: 9) | Effects |
| L235E | L248E | L118E | Reduces FcγR binding; |
| | | | reduces ADCC |
| L234A/L235A | L247A/L248A | L117A/L118A | Reduce FcγR and |
| | | | C1q binding; reduced |
| | | | ADCC, ADCP and |
| | | | CDC |
| L234E/L235F/ | L247E/L248F/ | L117E/L118F/ | Reduce FcγR and C1q |
| P331S | P350S | P214S | binding; reduce CDC |
| L234F/L235E/ | L247F/L248E/ | L117F/L118E/ | Reduce FcγR and |
| P331S | P350S | P214S | C1q binding; reduce |
| | | | effector functions |
| L234A/L235A/ | L247A/L248A/ | L117A/L118A/ | Eliminate FcγR and |
| P329G | P348G | P212G | C1q binding; reduce |
| | | | ADCP and CDC |
| L234A/L235A/ | L247A/L248A/ | L117A/L118A/ | Reduced binding to |
| G237A/P238S/ | G250A/P251S/ | G120A/P121S/ | FcγR1, IIa, IIb and |
| H268A/A330S/ | H281A/A349S/ | H151A/A213S/ | IIIa; reduced ADCC |
| P331S | P350S | P214S | and CDC |
| G236R/L328R | G249R/L347R | G119R/L211R | Reduced binding to |
| | | | FcγRs; reduced |
| | | | ADCC |
| G237A | G250A | G120A | Reduces binding to |
| | | | FcγRII; reduced ADCP |
| E318A | E337A | E201A | Reduces binding to |
| | | | FcγRII; reduced ADCP |
| D265A | D278A | D148A | Reduces binding to |
| | | | FcγRI, II, III; reduced |
| | | | ADCC and ADCP |
| E233P | E246P | E116P | Reduces binding to |
| | | | FcγRI, II, III; reduced |
| | | | ADCC and ADCP |
| N297A | N314A | N180A | Remove glycosylation |
| | | | site; decrease |
| | | | interaction with |
| | | | FcγRs; reduce |
| | | | effector functions |
| | | | (CDC, ADCC, ADCP) |
| N297Q | N314Q | N180Q | Remove glycosylation |
| | | | site; decrease |
| | | | interaction with |
| | | | FcγRs; reduce |
| | | | effector functions |
| | | | (CDC, ADCC, ADCP) |
| N297D | N314D | N180D | Remove glycosylation |
| | | | site; decrease |
| | | | interaction with |
| | | | FcγRs; reduce |
| | | | effector functions |
| | | | (CDC, ADCC, ADCP) |
| N297G | N314G | N180G | Remove glycosylation |
| | | | site; decrease |
| | | | interaction with |
| | | | FcγRs; reduce |
| | | | effector functions |
| | | | (CDC, ADCC, ADCP) |
| N297G/D265A | N314G/D278A | N180G/D148A | Reduces binding to |
| | | | FcγRs and C1q; |
| | | | reduces effector |
| | | | functions |
| A330L | A349L | A213L | Reduced C1q binding; |
| | | | reduced CDC |
| D270A | D283A | D153A | Reduced C1q binding; |
| | | | reduced CDC |
| P329A | P348A | P212A | Reduced C1q binding; |
| | | | reduced CDC |
| P331A | P350A | P214A | Reduced C1q binding; |
| | | | reduced CDC |
| K322A | K341A | K205A | Reduced C1q binding; |
| | | | reduced CDC |
| V264A | V277A | V147A | Reduced C1q binding; |
| | | | reduced CDC |
| F241A | F254A | F124A | Reduced C1q binding; |
| | | | reduced CDC |

TABLE 10
IgG4 Fc Modifications that Reduce or
Eliminate Immune Effector Functions

| | | Modifications | |
|---|---|---|---|
| Modifications | Modifications | by Sequential | |
| by EU | by Kabat | Numbering | |
| Numbering | Numbering | (SEQ ID NO: 15) | Effects |
| L235E | L248E | L115E | Reduces FcγR |
| | | | binding; reduces |
| | | | ADCC |
| F234A/L235A | F247A/L248A | F114A/L115A | Reduce FcγR and |
| | | | C1q binding; |
| | | | reduced ADCC, |
| | | | ADCP and CDC |
| S228P/L235E | S241P/L248E | S108P/L115E | Reduce FcγR |
| | | | binding; reduced |
| | | | effector functions |
| S228P/F234A/ | S241P/F247A/ | S108P/F114A/ | Reduced binding to |
| L235A | L248A | L115A | FcγRI, IIa and IIIa; |
| | | | reduced ADCC |
| | | | and CDC |

[0959] ii. Other Modifications of Fc Portions

[0960] The Fc portion also can be modified to increase binding to inhibitory FcγRs, which results in the suppression of the immune response. Therapeutic antibodies with immunosuppressive Fc modifications are advantageous for the treatment of inflammatory diseases. These mutations can be incorporated into the Fc portions of constructs herein that are intended for treatment of diseases and conditions with an inflammatory component or etiology or involvement. For example, the immunosuppressive version of an anti-CD19 antibody (XmAb5871; Xencor), containing the mutations S267E/L328F (by EU numbering), binds inhibitory FcγRIIb with ˜430-fold increased affinity, and depletes CD19⁺ B-cells in patients with systemic lupus erythematosus (SLE). The same mutations, when introduced into a humanized anti-IgE antibody (XmAb7195; Xencor), prevent the binding of IgE to its high-affinity receptor (FcεRI) that is present on basophils and mast cells, increases affinity for FcγRIIb by ˜430-fold, and is used for the treatment of allergies, including allergic asthma. The anti-CD3 antibody TRX4 (Tolerx), containing the aglycosylating Fc mutation N297A (by EU numbering), suppresses pathogenic T-cells and restores normal Treg cell activity in type-1 diabetes (autoimmune) patients (see, e.g., Saxena et al. (2016) Front. Immunol. 7:580).

[0961] An additional example is the monomeric IgG1 Fc (mFc), containing the mutations L351S/T366R/L368H/P395K (by EU numbering), which binds FcRn and exhibits similar in vivo half-life to dimeric Fc, and selectively binds FcγRI with high affinity, but does not bind FcγRIIIa, abrogating Fc-mediated cytotoxicity, including ADCC and CDC. FcγRI is expressed on inflammation-related cells, such as inflammatory macrophages. Targeting this receptor can be used for the treatment of chronic inflammatory diseases, such as arthritis, multiple sclerosis and cancer. The variant mFc, when fused to the Pseudomonas exotoxin A fragment (PE38), kills FcγRI⁺ macrophage-like U937 cells. Neither the variant mFc, nor the fusion protein, exhibits any cytotoxicity (ADCC or CDC) in vitro (see, e.g., Ying et al. (2014) mAbs 6(5):1201-1210).

[0962] Modifications that increase binding to, or that confer selective binding to, inhibitory FcγRIIb, and/or FcγRI but not FcγRIIIa, can be engineered into the IgG Fc regions in the TNFR1 antagonists and TNFR1 antagonist/TNFR2 agonist constructs provided herein. These modifications include, but are not limited to, one or more of S267E, N297A, L328F, L351S, T366R, L368H, P395K, S267E/L328F, L351S/T366R/L368H/P395K, and combinations thereof, by EU numbering. Table 11, below, shows the corresponding replacements by Kabat numbering, and by sequential numbering, with reference to the sequence of the IgG heavy chain constant domain set forth in SEQ ID NO:9.

TABLE 11
IgG1 Fc Modifications that Increase Binding to Inhibitory FcγRIIb

| | | Modifications by |
|---|---|---|
| Modifications by EU | Modifications by Kabat | Sequential Numbering |
| Numbering | Numbering | (SEQ ID NO: 9) |
| S267E | S280E | S150E |
| N297A | N314A | N180A |
| L328F | L347F | L211F |
| L351S | L372S | L234S |
| T366R | T389R | T249R |
| L368H | L391H | L251H |
| P395K | P423K | P278K |
| S267E/L328F | S280E/L347F | S150E/L211F |
| L351S/T366R/ | L372S/T389R/ | L234S/T249R/ |
| L368H/P395K | L391H/P423K | L251H/P278K |

[0963] iii. Human Serum Albumin (HSA)

[0964] A problem with the dAbs as previously provided (see, e.g., International PCT application No. 2008/149144) was that their serum half-life was insufficient for their use as therapeutics. They were linked to anti-HSA antibodies to bind to HSA; the half-life was insufficient. Herein, the dAbs or Vhh antibodies are linked to HSA. HSA has 33 cysteines; Cys34 is the only cysteine with a free sulfhydryl group that does not participate in a disulfide linkage. HSA can be linked via its N or C terminal to a dAb, directly or via a linker, such as a Gly-Ser linker, to extend the serum half-life of the dAb. It also can be linked via the free cysteine. Example 6 exemplifies a construct that contains a dAb linked via a Gly-Ser linker to the N-terminus of HSA.

[0965] e. Multi-Specific TNFR1 Antagonist/TNFR2 Agonist Constructs

[0966] To selectively inhibit TNFR1 signaling, while enhancing the beneficial effects of TNFR2 signaling, multi-specific, such as bispecific, constructs, containing an TNFR1 antagonist and a TNFR2 agonist, are provided (see, e.g., Formula 2 above). These multi-specific constructs can include linkers and activity modifiers to confer advantageous properties, as needed, as discussed above.

[0967] The TNFR1 inhibitor and TNFR2 agonist portions of constructs provided herein can be polypeptides or small molecules or combinations thereof; they can be linked directly in any order, or indirectly via a linker, such as a Gly-Ser linker, including any described herein, and/or a hinge region, or they can be linked via a chemical linker. The construct can contain an activity modifier, such as an Fc region or modified Fc, and/or other activity modifier, such as a polypeptide, such as HSA, that extends half-life, and can be polymer, such as PEG or polymeric moiety.

[0968] The C-terminus of a human TNFR1 antagonist, such as the TNFR1 antagonist set forth in any of SEQ ID NOs: 54-703, or an TNFR1 antagonist with about or at least about 95% sequence identity to the TNFR1 antagonist set forth in any of SEQ ID NOs: 54-703, is fused with the N-terminus of a first IgG1 Fc, such as the IgG1 Fc derived from trastuzumab. The order can be reversed.

[0969] The Fc region contains the C_{H}2 and C_{H}3 domains of the trastuzumab heavy chain (see, e.g., residues 234-450 of SEQ ID NO:26). In some embodiments, the linker between the TNFR1 antagonist and the first Fc subunit contains all or a portion of the hinge sequence of an antibody, such as trastuzumab (SCDKTH; corresponding to residues 222-227 of SEQ ID NO:26). To confer protease resistance and increase flexibility of the fusion protein, the SCDKTH hinge sequence or the protease cleavage site or both can be replaced with a Gly-Ser short peptide linker, such as, for example, GSGS, GGGGS, or GGGGSGGGGSGGGGS, and others described herein and/or known in the art. In other embodiments, only a GS linker is included. In another embodiment, the linker contains a PEG or a branched PEG, with a molecular weight of 30 kDa or more.

[0970] In some embodiments, the Fc subunits (also referred to as regions or domains) can be multimerized. The first Fc subunit is attached to a second Fc subunit via disulfide bonds. For bi-specific constructs, the C-terminus of the second Fc subunit is connected to the N-terminus of a TNFR2 agonist, such as, for example, the TNFR2 agonist of any of SEQ ID NOs: 765-801, 803, and 810, or a TNFR2 agonist with about or at least about 95% sequence identity to the TNFR2 agonist of any of SEQ ID NOs: 765-801, 803, and 810, or to a small molecule TNFR2 agonist. The second Fc subunit and the TNFR2 agonist are connected via the linker, such as the SCDKTH hinge sequence of trastuzumab, alone, or in combination with a short GS linker, as described above. In other embodiments, only a GS linker is included. In alternative embodiments, the single chain Fv fragment (scFv), or the Fab region, or other antigen-binding fragment, of a TNFR2 agonistic monoclonal antibody can be used; the scFv or Fab are dimerized by N-terminal fusion with the C-terminus of the Fc. As provided herein, the antigen-binding fragment can be derived from the TNFR2 agonistic mAbs MR2-1 and MAB226.

[0971] The Fc subunit can be modified to alter its activity. For example, a dimer is modified to prevent homodimerization, and/or to eliminate immune effector functions, such as antibody-dependent cellular cytotoxicity (ADCC), antibody-dependent cell-mediated phagocytosis (ADCP), and/or complement-dependent cytotoxicity (CDC), and/or to enhance neonatal FcR (FcRn) recycling to increase the in vivo half-life and stability of the recombinant construct, as described below.

[0972] In embodiments in which the constructs are for treatment of inflammatory diseases, the Fc portion is modified to have reduced or eliminated effector functions. In embodiments, for example, where construct is for the treatment of cancer, the Fc dimer is modified to enhance immune effector functions, such as ADCC, ADCP and/or CDC. The particular Fc modifications depend upon the intended disease target.

[0973] In some embodiments, the Fc subunit(s) can contain an IgG4 Fc region, such as the IgG4 Fc derived from nivolumab (Opdivo®), containing the C_{H}2 and C_{H}3 domains of the nivolumab heavy chain (see, e.g., residues 224-440 SEQ ID NO:29). A short peptide linker, containing all or a portion, sufficient to provide flexibility, of the hinge sequence of nivolumab, ESKYGPPCPPCP (see, e.g., residues 212-223 of SEQ ID NO:29), can be included between the nivolumab Fc region and the TNFR1 antagonist and/or the TNFR2 agonist. Optionally, or alternatively, a GS linker also can be included.

[0974] In exemplary embodiments, since TNFR2 can require receptor aggregation/clustering for signaling, a bivalent antibody-like structure can be generated to achieve superior agonism. In this embodiment, the C-terminus of the first and second Fc subunits each is fused to the N-terminus of an TNFR2 agonist, as described above. The Fc dimer is modified to prevent homodimerization, to eliminate antibody-dependent cellular cytotoxicity (ADCC) and complement-dependent cytotoxicity (CDC), and to enhance neonatal FcR recycling to increase the in vivo half-life of the recombinant construct, as described elsewhere herein.

[0975] PEGylation for Linking Components of the Multi-Specific Constructs, PEG-Centered Multi-Specific Construct, such as Bi-Specific, TNFR1 Antagonist/TNFR2 Agonist Constructs

[0976] PEGylation, which refers to the covalent attachment of the biocompatible and biologically inert polymer poly(ethylene glycol) (PEG) to molecules, such as proteins, peptides, drugs and other molecules, is another modifier of the activity of a construct. It can increase the aqueous solubility of molecules, increase the molecular weight of the molecule, prolong the in vivo circulation time, decrease peripheral clearance rates, minimize non-specific uptake, and target tumors via the enhanced permeability and retention (EPR) effect. PEGylation of therapeutic, including protein therapeutics, can mask undesirable antigenic surface markers to protect therapeutics from the action of antibodies and antigen processing cells, and reducing degradation by proteolytic enzymes and other inactivating processes. PEGylation also increases the molecular weight of the protein therapeutic, prolonging the in vivo half-life and reducing peripheral clearance, and allowing for less frequent administrations.

[0977] The chemical conjugation of therapeutic molecules to polymers such as PEG can form stable ester or amide bonds, as well as disulfide bonds. Conjugation of PEG to a molecule of interest, such as the TNFR1 antagonists and TNFR2 agonists provided herein, can be achieved, for example, by using coupling agents, such as, for example, dicyclohexylcarbodiimide (DCC), 1-ethyl-3-(3-dimethylaminopropyl)carbodiimide (EDC), HATU (1-[Bis(dimethylamino)methylene]-1H-1,2,3-triazolo[4,5-b]pyridinium 3-oxid hexafluorophosphate), or others known in the art, or by using N-hydroxysuccinimide (NHS) esters, such as PEG NHS esters. Other methods include the use of PEG maleimides, which react with sulfhydryl groups on the protein or peptide; PEG pentafluorophenyl (PFP) esters, which react with primary and secondary amines; thiol PEG, which reacts with thiols on the side chains of cysteine residues; and click chemistry techniques. PEG azides, propargyl PEG, aminooxy PEG, hydroxy PEG, amino PEG, PEG acid, biotin PEG, PEG tosylate, and PEGs with other functional groups also are commercially available and can be used for conjugation to peptides and other therapeutic molecules.

[0978] A common method to prepare PEG-protein conjugates is by coupling —NH₂ groups on the protein and monomethoxy PEG (mPEG) with an electrophilic functional group; this approach results in the formation of polymer chains that are covalently linked to a globular protein at the core. This property is exploited herein to provided PEG-centered constructs in which PEG, or chemically similar or suitable moieties, display a plurality of binding or interacting moieties to one or a plurality of different targets. In order to increase drug (binding moiety) loading, multi-arm or branched chain PEGs (or similar moieties or branched chain moieties) can be used. Alternatively, the drug can be conjugated to small PEG dendrons (see, e.g., the PEG conjugation protocols on the BROADPHARM® website, available at broadpharm.com/web/protocols.php; see, also, Banerjee et al. (2012) Journal of Drug Delivery, Article ID 103973). In order to attach a plurality, such as two, different therapeutic moieties, a heteromultifunctional, such as heterobifunctional, PEG moiety, with different reactive groups, such as at each end, can be used. The PEG moiety can have two, three, or more different reactive groups. Such molecules can be used to deliver two or more different ligands, targeting two different receptors on the same cell or different cells, such as TNFR1 and TNFR2, as described herein, or to deliver two targeting agents that bind to different sites on the same receptor, or to cluster a receptor, for example, to activate or inhibit the receptor, or to cross-link two different receptors, for example, to inhibit receptor activity. Homobifunctional PEG molecules, with identical reactive groups at each of the ends, can be used to cluster identical receptors on the same cell, or, if the PEG chain length permits, on different cells. Such constructs can be used to trap circulating soluble receptors, or ligands, such as TNF. FIGS. 3A-D herein provide exemplary constructs that employ PEG moieties to display drugs (binding reactive moieties).

[0979] To increase reactivity and flexibility, enhance ligand-protein binding, and reduce steric hindrance, the constructs can include a linker molecule or plurality thereof as described herein as a spacer molecule. Such spacers include, for example, amino acid spacers, such as alanine, glycine, and small peptides. Any of the linkers described herein, including GS linkers and other flexible linkers, as well as rigid linkers, can be used to conjugate reactive moieties, such as TNFR1 inhibitor moieties, as described herein and/or TNFR2 agonists described herein to a multifunctional PEG molecule. These constructs also can include the activity modifiers, such as Fc regions.

[0980] The use of branched PEG moieties, or multi-arm PEG moieties as described herein (see, e.g., FIG. 5), with or without linkers, is not limited to use in constructs containing a TNFR1 inhibitor moiety or TNFR2 agonist, or combinations of both, but can be used to present other inhibitor and/or agonist moieties of any receptor(s) of interest and/or to also produce immunotoxins and other toxic conjugates. Methods for synthesis of a multitude of PEG moieties and variations thereof are known (see, e.g., US Patent Publication No. 2010/0221213; Han et al., (2014) Sci Rep 4:4387.

[0981] For example, in some embodiments that contain TNFR1 inhibitor and TNFR2 agonist moieties, the construct includes a bifunctional PEG moiety, and also includes linkers between the PEG moiety and each of the TNFR1 antagonist and the TNFR2 agonist. The multi-specific construct, contains a branched PEG polymer to which the linker is attached and to which one or both of the TNFR1 inhibitor moiety and TNFR2 moiety is/are attached. A suitable PEG moiety can have a molecular weight of 30 kDa or more, for example, 30-40 kDa or more. An exemplary branched PEG molecule can be, for example, a 3-arm, heterobifunctional PEG molecule that contains one arm, with one type of reactive group (RG1; e.g., —NH₂), that is linked to a TNFR1 inhibitor moiety, and two arms, with a different type of reactive group (RG2; e.g., —COOH), that each are linked to a TNFR2 agonist. Such 3-arm heterobifunctional branched PEG molecules are commercially available (e.g., from BROADPHARM®). The first PEG arm can be linked to the N-terminus or C-terminus of the TNFR1 inhibitor moiety, and the other two arms can be linked to the N-terminus or C-terminus of the TNFR2 agonists or to the TNFR2 agonists, if they are small molecules. In some embodiments, the constructs also can include an optional linker, as described herein. Such linker can be included between the PEG arms and the TNFR1 inhibitor moiety and/or TNFR2 agonist(s). Such PEG-centered bi-specific constructs provide monovalency for the TNFR1 antagonist activity, which prevents TNFR1 receptor clustering that leads to unwanted agonism, and provides bivalency for TNFR2 receptor clustering, which enhances TNFR2 signaling. An exemplary structure for the PEG-centered bi-specific TNFR1 antagonist/TNFR2 agonist constructs described herein, among those depicted in FIGS. 3A-D.

[0982] In another embodiment, the linker between the TNFR1 antagonist and the TNFR2 agonist contains a branched PEG with a molecular weight of 30 kDa or more. The branched PEG molecule contains one branch that it linked to the N-terminus of the TNFR1 antagonist, and two branches that are each linked to an TNFR2 agonist, providing bivalency for TNFR2 receptor clustering, which enhances TNFR2 signaling.

[0983] FIGS. 3A-D depict various configurations of multi-specific constructs in which PEG moieties link functional moieties. PEGylation moieties and PEGylation procedures are discussed in more detail in section H, below. Methods for preparing various PEG linkers and configurations are well known to those of skill in the art (see, e.g., creativepegworks.com/pegylation_literature.php; and broadpharm.com/web/protocols.php). In FIGS. 3A-D, each “n” can be independently 1-10, such as 1-7, 1-5, and 1-3, 1, or 2. In FIG. 3A, each n is generally 1-3, depending upon the particular ligands that are displayed. In the others of FIGS. 3B-D, n generally is 1 to 5. N can be 1 in all the embodiments. Those of skill in the art will recognize other routine changes in the PEG moieties that serve as the central linkers; similar moieties can be used in place of PEG.

### In FIG. 3A:

[0984] R¹ is H or lower alkyl (C1 to C5, or C1 or C2), such as CH₃, n is generally 1 to 5, such as 1 or 2. The figures depict ligands or epitopes that bind to multiple targets (i.e., epitopes on a receptor, such as targets (the circles) 1 a,b,c represent different epitopes on the same receptor). Target 2 can be an epitope on a different receptor. In FIGS. 3B and 3C, the circles are ligands to target epitopes or receptors, n is generally 1-5, typically n is 1 or 2, generally 1. FIG. 3D depicts a homobifunctional construct; n typically is 1-3, generally lor 2, such as 1. The activity modifier, such as an Fc or others as described herein or known to those of skill in the art, is optional. In all of these constructs, the PEG portion is generally ‘inactive’ except for providing the activity modifying activity, such as half-life extension and/or sterically connecting the operative pieces that bind to intended targets (peptides, small molecules, aptamers, and others).

[0985] FIG. 3A depicts an exemplary bivalent construct in which PEG is a central portion. One circle is, for example, a polypeptide agonist, antagonist or a binding protein, such as an antibody or antigen-binding fragment thereof, or an aptamer (nucleic acid or peptide). The other circle represents a different moiety, such as a polysaccharide or receptor ligand. The bivalent structure provides for clustering of targets for receptor activation. In some embodiments provided herein, the targets include TNFR1 and TNFR2, and the circles represent the TNFR1 inhibitors and TNFR2 agonists as described throughout the disclosure herein. FIG. 3B depicts a monovalent single ligand, such as CD3+, which can prevent cytokine release syndrome, linked via the PEG moieties to the agonist, antagonist, or binding protein, which is bivalent for receptor clustering. FIG. 3C depicts a heterobifunctional PEG (or other such carrier) for crosslinking two different cell targeting agents, or two agents, such as trastuzumab and pertuzumab, that bind to different sites on the same receptor or two receptors. The constructs of FIGS. 3B and 3C can be used, for example, to cluster a checkpoint control receptor for either stimulation or inhibition of an immune response, or to crosslink two different receptors to achieve suppression of receptor activity (i.e., CD3 vs CD450), or to deliver two different ligands, such as a stimulatory and a co-stimulatory ligand, to two different receptors on the same cells. These constructs also can serve as prodrugs that be directed to or accumulate in hypoxic regions with lower pH where a linked moiety can be released chemically by protonation. For example, for a tumor, this can be a toxin, or can be a TNF inactivator (i.e., aptamer or peptide) that is released locally.

[0986] FIG. 3D depicts a homobifunctional PEG for clustering identical receptors on the same or different cells, depending upon chain length, or to trap circulating disease target, such as a soluble receptor or ligand, such as TNF. Additionally, in all of these embodiments additional PEG side chain(s), optionally linked to another reactive group or functional group, such as a serum half-life extending moiety, such as HSA, or an FcRn polypeptide, can be included in these constructs.

[0987] Other structures, where X and Y refer to reactive groups, such as binding moieties, molecules that interact with a target, also are contemplated (see, FIG. 4):

[chemical structure]

[0988] Other examples (see, e.g., FIG. 5) are as follows, X and Y, as above can be any targeting moiety or binding moiety or drug for interacting with a target:

[chemical structure]

[0989] f. Additional Activity Modifiers—Fusion Proteins that Include Portions or Entire Polypeptides that Increase Serum Half-Life

[0990] Properties of the constructs can be altered by adding full-length polypeptides or portions thereof that increase serum half-life, but that do not substantially or do not alter the interaction of a construct with TNFR1 and/or TNFR2. This includes albumination and other such modifications (see discussion above regarding half-life extenders; reviewed in, Strohl (2015) BioDrugs 29(4):215-239, see also, Tan et al. (2018) Current Pharmaceutical Design 24:4932-4946).

[0991] 5. Prediction and Removal of Immunogenicity in Protein Therapeutics

[0992] Many protein therapeutics, including those that contain human germline sequences, such as recombinant human cytokines and human antibodies, are immunogenic, and induce host immune responses against the therapeutics. As described herein, the constructs provided herein, including the TNFR1 antagonist molecules and TNFR2 agonist, and multi-specific constructs, described and provided herein, can be modified, if needed, such as by amino acid replacement, to remove or eliminate epitopes that are immunogenic or with which pre-existing antibodies interact.

[0993] The constructs are subjected to the prediction, identification and removal of immunogenic B-cell and/or T-cell epitopes, thus decreasing or eliminating any potential immunogenicity, and increasing the safety, tolerability and efficacy of the therapeutic molecules. The molecules are tested in in vitro assays and in vivo animal models to determine immunogenicity before and after the removal of immunogenic sequences.

[0994] As discussed in more detail below, protein therapeutics can contain immunogenic B-cell and/or T-cell epitopes. When the immune system recognizes a protein therapeutic as a foreign agent, a coordinated, undesirable immune response towards the therapeutic is induced. The response can result in clinical complications including, for example, rapid drug clearance, reduced drug functionality and efficacy, delayed infusion-like allergic reactions, anaphylaxis, and in some cases, life-threatening autoimmunity. Immune responses against protein therapeutics occur via two different mechanisms; a classical immune response and by breaking tolerance. The immunological discrimination between self and non-self proteins determines the mechanism of the immune response, and proteins recognized as foreign induce a classical immune response, characterized by the formation of antibodies within days to weeks after administration, often after a single injection of the protein therapeutic. This response is long-lasting and difficult to reverse once memory B-cells have formed. Subsequent exposure to the protein induces a secondary response, characterized primarily by significant amounts of IgG that negatively impacts therapy. Therapeutic proteins that induce classical immune responses include replacement therapies, such as rhGAA (recombinant human acid alpha-glucosidase) and FVIII, as well as monoclonal antibody (mAb) therapeutics, where the complementarity-determining region (CDR) is highly immunogenic and leads to the generation of anti-idiotypic alloantibodies due to a lack of central tolerance to the CDR region. Therapeutic proteins that are homologous to endogenous proteins typically do not result in an immune response due to established immune tolerance, however, they can become immunogenic by breaking B-cell tolerance after repeated administrations, such as the case with IFN-γ, IFN-β and erythropoietin (EPO) (see, e.g., Baker et al. (2010) Self/Nonself 1(4):314-322; Choi et al. (2017) Methods Mol. Biol. 1529:375-398; Dingman et al. (2019) J. Pharm. Sci. 108(5):1637-1654).

[0995] Factors that influence the immunogenicity of a protein therapeutic, include, for example, the duration of treatment, and the route and frequency of administration; subcutaneous administration of protein therapeutics is more immunogenic than intravenous administration, and prolonged, frequently administered therapies are more immunogenic. Patient-related factors, such as the immune status of the patient and polymorphisms of the MHC (or HLA in humans) molecules, also affect protein immunogenicity. For example, MHC molecules are highly polymorphic, and several different alleles for MHC II exist, including different subunits, such as DP, DM, DOA, DOB, DQ and DR; these receptor subtypes differ in binding affinity for epitopes, and thus, differences in MHC subtypes between patients can affect the immune response against a protein therapeutic. Patient immune status also can affect immunogenicity, as autoimmune patients respond more strongly than immunocompromised patients to protein therapeutics. Other factors affecting immunogenicity include properties of the protein product, including, for example, the presence of immunogenic epitopes recognized by MHC II, the formation of aggregates in the final product, the oxidation of proteins, aggregates in formulations, and post translational modifications, such as glycosylation. Recombinant proteins can be produced in several different cell types, including, for example, bacterial cells, such as E. coli, and mammalian cells, such as CHO cells. Proteins expressed in bacteria are not subjected to post translational modifications such as glycosylation, but proteins produced in mammalian cells are, which can lead to different immunogenicity. For example, the interferon sold under the trademark Betaseron®, an interferon β-1b, is produced in E. coli cells and is not glycosylated, while the later developed product sold under the trademark Avonex® (an interferon β-1a), is produced in CHO cells with recombinant DNA technology. Betaseron has a much higher immunogenicity than Avonex® interferon, at 35% vs. 5%, respectively. This difference can be attributed in part to the differences in glycosylation patterns, that can lead to aggregation (see, e.g., Dingman et al. (2019) J. Pharm. Sci. 108(5):1637-1654).

[0996] An effect following administration of a protein therapeutic is the development of high-affinity anti-therapeutic antibodies, which are also known as anti-drug antibodies, or ADAs. The generation of ADAs involves the stimulation of adaptive and non-adaptive immune responses, that primarily are polyclonal, and that can have neutralizing and non-neutralizing effects on protein therapeutics. ADAs can contain multiple isotypes (e.g., IgM, IgE and IgG) as well as sub-classes (e.g., IgG1-4) of heavy chain constant regions, and contain variable regions that bind with high affinity to the protein therapeutic, and thus, have undergone somatic hypermutation of variable region genes. The immune responses are induced by the recognition of immunogenic peptide fragments, such as B-cell and T-cell epitopes, in the protein therapeutic. Thus, many protein therapeutics require de-immunization, while retaining the desired therapeutic activity, before they can be applied to the clinic (see, e.g., Baker et al. (2010) Self/Nonself 1(4):314-322; Choi et al. (2017) Methods Mol. Biol. 1529:375-398).

[0997] The formation of anti-drug antibodies (ADAs) against protein therapeutics is mediated by antigen-presenting cells (APCs), such as dendritic cells (DCs) and macrophages, and by B and T lymphocytes. MHC class II-restricted T-cell epitopes present in the sequences of protein therapeutics can result in the development of humoral responses against protein therapeutics. For example, DCs, stimulated via pattern recognition receptors (PRRs), stimulate T-cells and induce the generation of a T-cell-dependent high-affinity ADA response. In the first step in a T-cell-dependent antibody response, APCs phagocytose the protein therapeutic, process the antigens into peptide epitopes, and present the epitopes to naïve T cells by coupling them with major histocompatibility complex (MHC) class II molecules on the APC cell surface. To fully activate a T-cell, which is required to activate B-cells, a T-cell receptor (TCR) must interact with the MHC II-epitope complex, and this must be accompanied by additional signals from costimulatory molecules, such as CD80 and CD86, which are provided by the APC. Naïve B-cells are activated by the interaction between IgM and IgD receptors on the B-cell surface and their cognate antigens. Antigen specific T-cells then secrete cytokines that stimulate B-cell proliferation and maturation to plasma cells, which results in the engagement of CD40 and CD40 ligands, providing a further signal that leads to antibody production by B-cell clonal expansion and differentiation into antibody-secreting plasma cells and memory B-cells. Memory B-cells remain dormant until subsequent exposure to the therapeutic protein, while plasma cells secrete antibodies that recognize specific epitopes on the therapeutic protein that are presented by APC MHC receptors. Many protein therapeutics, including recombinant human proteins, contain potent T-cell epitopes. For example, the immunogenicity of IFNβ1b was ameliorated after the mapping and removal of a single immunodominant (but not a sub-dominant) T-cell epitope via amino acid mutation.

[0998] Immunogenicity also can occur in a T-cell-independent process, whereby the antigen engages B-cells directly. High molecular weight aggregates of a protein therapeutic can induce T-cell dependent and independent anti-drug antibody responses by stimulating DCs or by cross-linking B-cell receptors. For example, T-independent stimulation of B-cells, generating an ADA response, can occur if the protein therapeutic forms a multimeric structure that can cross-link the B-cell receptor (BCR) sufficiently effectively to obviate the need for co-stimulation from T-cells. There is a correlation between enhanced immunogenicity and aggregated or multimeric proteins. For example, aggregated, but not monomeric, recombinant human interferon (IFN)α results in the generation of IFNα-specific antibodies in human IFNα transgenic mice. The formation of aggregates depends on drug solubility and production processes (see, e.g., Baker et al. (2010) Self/Nonself 1(4):314-322; Dingman et al. (2019) J. Pharm. Sci. 108(5):1637-1654; De Groot, A. S. and Moise (2007) Curr. Opin. Drug Discov. Devel. 10(3):332-340).

[0999] ADA responses against protein therapeutics can be in the form of neutralizing or binding antibodies. Neutralizing antibodies recognize regions within the protein therapeutic that are necessary for biological activity, and eliminate its activity directly. The humoral response is directed against B-cell epitopes within the protein therapeutic, which results in the ability to neutralize the protein therapeutic. For example, human anti-mouse (HAMA) or human anti-human (HAHA) responses, directed against the idiotype of antibody therapeutics, are neutralizing and can be generated against humanized and fully human antibodies. For example, in 30% of hemophilia A patients, neutralizing ADAs develop against administered recombinant FVIII, abrogating its hemostatic efficacy, and in 89-100% of Pompe disease patients receiving rhGAA, anti-rhGAA neutralizing antibodies destroy the therapeutic efficacy. Binding antibodies alter the pharmacokinetic properties of the protein therapeutic, and indirectly impact its efficacy by reducing systemic exposure, for example, by promoting rapid clearance of the protein. For example, long-term use of adalimumab results in the development of ADAs in ˜28% of patients, resulting in lower adalimumab concentrations and poorer clinical outcomes (see, e.g., Baker et al. (2010) Self/Nonself 1(4):314-322; Dingman et al. (2019) J. Pharm. Sci. 108(5):1637-1654).

[1000] ADA levels can be assessed and monitored before, during, and after treatment. Various assays are available. These assays include bridging immunoassays, which involve labeling the drug, and detecting ADAs that form a bridge between two labeled drug molecules. Bridging assays can be used for all antibody classes and with any type of sample. Ligand-binding assays (LBAs), which are used to detect binding to a target, include surface plasmon resonance (SPR), electrochemiluminescence, and biolayer interferometry, and also can be used to detect ADAs. Protein specific assays, such as the Bethesda Assay, which has been used to measure the concentration of neutralizing anti-FVIII antibodies, can be used. Anti-PEG antibodies also can be measured in an assay where biotin-PEG is conjugated to magnetic beads, and the amount of anti-PEG antibodies bound to the beads is measured using a sensor that detects changes in the size of the complex. Drug-tolerant assays overcome the limitations caused by the presence of drug in the sample, and improve the quantification of ADAs. These include, for example, pH shift idiotype antigen-binding assays, acid dissociation assays, temperature shift assays, and electrochemiluminescence assays. Enzyme-linked immunosorbent assays (ELISAs) can be used to detect ADAs; the protein therapeutic is coated on a plate and incubated with samples to measure bound ADA. ELISAs for the detection of ADAs, can be limited because of the lack of standards for the ADAs. Other methods include Immune-PCR, an extension of bridging assays, in which the complex is labeled with biotin that is detected using an anti-biotin antibody conjugated to DNA. The DNA then is amplified using PCR and quantified to assess ADA levels. Immuno-LC/MS can be used to detect ADAs in plasma samples; the samples must be enriched by tagging the drug with biotin, or by spiking excess drug into the sample to saturate ADA binding (see, e.g., Dingman et al. (2019) J. Pharm. Sci. 108(5):1637-1654).

[1001] The prediction of and removal of immunogenic epitopes from protein therapeutics (i.e., de-immunization) can increase the efficacy and safety of the therapeutics, and prevent adverse effects that could lead to drug failure in clinical trials. For example, the depletion of T-cell epitopes from protein therapeutics by de-immunization has been successful in the progression of protein therapeutics, particularly antibodies, into clinical trials. These results indicate the importance of T-cell epitopes in the generation of ADA responses, and that de-immunization provides safer, less immunogenic therapeutics (see, e.g., Baker et al. (2010) Self/Nonself 1(4):314-322). These methods can be used to detect or identify or predict immunogenicity of the constructs provided herein, and can be used to identify amino acid mutations to eliminate or reduce immunogenicity or immune responses in subjects. Provided are constructs that have been modified to decrease or eliminate immunogenicity. De-immunization of protein therapeutics involves the identification of highly immunogenic B-cell and/or T-cell epitopes, and deletion of the identified epitopes by mutagenic substitution of key amino acid residues. As discussed below, preclinical prediction and assessment of immunogenic regions within a protein therapeutic sequence includes the use of in silico tools that focus on epitope mapping, in vitro methods, such as epitope mapping, MHC/HLA affinity assays and T-cell proliferation assays, and in vivo testing in animal models. To increase the efficiency of protein therapeutic de-immunization, computational epitope predictive tools are used. In silico tools include databases and algorithms to rapidly predict immunogenic sequences in peptide libraries. The results then can be confirmed, and the specific immunogenic effects of the epitopes on B-cells or T-cells can further be evaluated using in vitro assays. The effects on the immune response to the protein therapeutics can be evaluated using in vivo assays in animal models, such as transgenic mice, and non-human primates.

[1002] Once an immunogenic epitope is identified, the amino acid sequence of the therapeutic can be modified to remove the epitope. Methods for removal include random or site-directed mutagenesis to remove the immunogenic sequence (i.e., to de-immunize the epitope). Following mutagenesis, the immunogenic sequence is re-evaluated to confirm that it is no longer immunogenic. There are in silico tools to streamline this process; for example, programs are available that sequentially replace each amino acid in the immunogenic sequence, with one of the other 19 naturally occurring amino acids (particularly alanine), and then re-evaluate the immunogenicity of the sequence. In this way, non-immunogenic sequences can efficiently be narrowed down to the most promising candidates prior to peptide synthesis and in vitro and/or in vivo re-evaluation of immunogenicity. The prediction and mutagenic deletion of immunogenic epitopes, however, is not necessarily sufficient for protein de-immunization, as the protein must retain its folded, stable and active structure in order to retain its therapeutic efficacy. Thus, epitope-deleting mutations must be selected that are compatible with the protein's structure and function.

[1003] The methods and approaches discussed below, are used to predict, identify, and eliminate epitopes from the constructs provided herein.

[1004] a. B-Cell and T-Cell Epitopes

[1005] The interaction between antigen and antibody is important for the induction of a humoral immune response against an invading pathogen. A specific antibody recognizes a particular antigen at discrete regions that are known as antigenic determinants, or B-cell epitopes. B-cell epitopes contain clusters of amino acids that are solvent-exposed and surface accessible, and that are recognized and bound by secreted antibodies, or by B-cell receptors (BCRs), which contain membrane-bound immunoglobulins that induce a cellular or humoral immune response.

[1006] The identification of B-cell epitopes is part of the development of antibody and other protein-based therapeutics. B-cell epitopes are classified, based on spatial structure, as continuous (also known as linear) epitopes, that contain sequential residues, and discontinuous (also known as conformational) epitopes, which are nonlinear and conformational. Discontinuous B-cell epitopes contain groups of solvent-exposed amino acid residues that are not fully sequential, but that are brought together in close proximity when the protein/antigen is folded into its three-dimensional conformation. Approximately 90% of B-cell epitopes are conformational. Linear B-cell epitopes can be recognized by antibodies following antigen denaturation, but conformational epitopes are no longer recognized if the antigen is denatured. The minimal amino acid sequence, or contact residue span, that is required for proper folding of a discontinuous B-cell epitope ranges from approximately 20 to 400 residues in native proteins. The majority of identified linear B-cell epitopes are thought to be components of conformational B-cell epitopes, and it has been shown that over 70% of discontinuous B-cell epitopes are contained of 1-5 linear segments, each of 1-6 amino acids in length (see, e.g., Potocnakova et al. (2016) Journal of Immunology Research, Article ID 6760830; Sanchez-Trincado et al. (2017) Journal of Immunology Research, Article ID 2680160).

[1007] T-cell epitopes are linear and bind to major histocompatibility complex (MHC) molecules via the interaction of the amino acid side chains with binding pockets in the MHC epitope-binding groove. The presence or absence of specific side chains determines if, and how tightly, an epitope binds to MHC (see, e.g., De Groot, A. S. and Moise, L. (2007) Curr. Opin. Drug Discov. Devel. 10(3):332-340). T-cells have T-cell receptors (TCRs) that recognize antigens that are displayed on the surfaces of antigen presenting cells (APCs) and bound to MHC molecules. T-cell epitopes are presented by MHC class I (MHC I) and II (MHC II) molecules, that are recognized by CD8⁺ and CD4⁺ T-cells, respectively; thus, there are CD8⁺ and CD4⁺ T-cell epitopes. CD8⁺ T-cells form into cytotoxic T lymphocytes (CTLs) after CD8⁺ T-cell epitope recognition, while primed CD4⁺ T cells form into helper T (Th) cells, which amplify the immune response, or into regulatory T (Treg) cells, which are immunosuppressive (see, e.g., Sanchez-Trincado et al. (2017) Journal of Immunology Research, Article ID 2680160).

[1008] b. In Silico Epitope Prediction Methods

[1009] Experimental studies and in silico analyses indicate that the majority of epitopes span 15-25 residues and an area of 600-1000 Å², organized in loops, and that the epitope sequence is enriched with tyrosine, tryptophan, charged, and polar amino acids with exposed side chains, and with specific amino acid pairs. However, it has been demonstrated that the differences between epitope and non-epitope residues are not significant, and amino acid composition alone is insufficient for differentiating between epitopes and non-epitopes. The combination of epitope mapping technologies and bioinformatics has led to the development of immunoinformatics, which involves the use of computational methods in immunology for the identification of structures of antibody, B-cell, T-cell and allergen, the prediction of MHC binding, the modelling of epitopes, and the analysis of immune networks (see, e.g., Potocnakova et al. (2016) Journal of Immunology Research, Article ID 6760830).

[1010] i. In Silico Prediction of B-Cell Epitopes

[1011] B-cell epitope prediction identifies immunogenic epitopes so that they can be replaced/de-immunized, for example, for therapeutic protein production. Databases of known B-cell epitopes have been developed, and include multifaceted databases such as the Immune Epitope Database (IEDB) and IEDB-3D (available at iedb.org) and AntiJen (available at ddg-pharmfac.net/antijen/AntiJen/antijenhomepage.htm); B-cell oriented databases such as BciPep (available at imtech.res.in/raghava/bcipep/info.html), Epitome (available at rostlab.org/services/epitome/) and the Structural Database of Allergenic Proteins (SDAP; available at fermi.utmb.edu/); and single pathogenic organism oriented databases, such as the HIV Molecular Immunology Database (available at hiv.lanl.gov/content/immunology/index.html), FLAVIdB (available at cvc.dfci.harvard.edu/flavi/), and the Influenza Sequence and Epitope Database (ISED; available at influenza.cdc.go.kr). Other B-cell epitope databases include the Conformational Epitope Database (CED; available at immunenet.cn/ced/), the Protein Data Bank (PDB; available at resb.org), and the Structural Epitope Database (SEDB; available at sedb.bicpu.edu.in) (see, e.g., Potocnakova et al. (2016) Journal of Immunology Research, Article ID 6760830).

[1012] Several algorithms for predicting B-cell epitopes from their sequence or structure are available. The algorithms have been developed, which initially relied on the identification of linear epitopes through propensity scale, but have been improved through the development of methods based on machine learning, such as the Hidden Markov Model (HMM), recurrent neural network (RNN), and support vector machine (SVM). In silico B-cell epitope prediction tools include those that predict continuous/linear B-cell epitopes, and those than predict discontinuous/conformational B-cell epitopes. Prediction of discontinuous B-cell epitopes requires information on amino acid statistics, spatial information and surface exposure. Web available tools for continuous/linear B-cell epitope prediction include, for example, ABCPred (available at crdd.osdd.net/raghava/abcpred/), APCPred (available at omictools.com/apcpred-tool), BCPREDs (BCPred and FBCPred, available at ailab.ist.psu.edu/bcpred/), BepiPred (available at cbs.dtu.dk/services/BepiPred/), LBtope (available at crdd.osdd.net/raghava/lbtope/), BcePred (available at crdd.osdd.net/raghava/bcepred/), EPMLR (available at bioinfo.tsinghua.edu.cn/epitope/EPMLR/), BEST (B-cell Epitope Prediction using Support Vector Machine Tool; available at biomine.cs.vcu.edu/datasets/BEST/), COBEpro (available at scratch.proteomics.ics.uci.edu/), PEOPLE (available at iedb.org/), and SVMTrip (available at sysbio.unl.edu/SVMTriP/). Web available tools for discontinuous/conformational B-cell epitope prediction include, for example, CEP (available at bioinfo.ernet.in/cep.htm), DiscoTope (available at cbs.dtu.dk/services/DiscoTope-2.0/), BEpro (formerly known as PEPITO; available at pepito.proteomics.ics.uci.edu/), ElliPro (available at tools.immuneepitope.org/ellipro/), SEPPA (Improved Spatial Epitope Prediction of Protein Antigens server; available at badd.tongji.edu.cn/seppa/), EPITOPIA (available at epitopia.tau.ac.il/), CBTOPE (available at crdd.osdd.net/raghava/cbtope/), EPCES (available at sysbio.unl.edu/EPCES/), EPSVR (Antigenic Epitopes Prediction with Support Vector Regression server; available at sysbio.unl.edu/EPSVR/), EPMeta (available at sysbio.unl.edu/EPMeta/), PEASE (Predicting Epitopes using Antibody Sequence; available at ofranlab.org/PEASE), EpiPred (available at opig.stats.ox.ac.uk/webapps/sabdab-sabpred/EpiPred.php), 3DEX (3D-Epitope-Explorer; not available online), PEPOP (available at pepop.sys2diag.cnrs.fr/), PEPOP 2.0 (available at sys2diag.cnrs.fr/index.php?page=pepop), and EpiSearch (available at curie.utmb.edu/episearch.html) (see, e.g., Potocnakova et al. (2016) Journal of Immunology Research, Article ID 6760830; Sanchez-Trincado et al. (2017) Journal of Immunology Research, Article ID 2680160; Sun et al. (2013) Comput. Math Method M., Article ID 943636).

[1013] Sequence-based and binding site prediction methods also can be used to predict B-cell epitopes. Sequence-based prediction tools rely on the primary sequence of an antigen, and employ propensity scales to measure the probability of each residue being part of an epitope. Sequence-based prediction tools include BEST, which predicts conformational B-cell epitopes. Binding site prediction tools, which aim to identify the binding sites for conformational B-cell epitopes on antibodies, include, for example, ProMate, ConSurf, PINUP and PIER (see, e.g., Sun et al. (2013) Comput. Math Method M., Article ID 943636).

[1014] Conformational B-cell epitopes in a protein or antigen with a known 3D-structure can be identified using mimotope-based epitope prediction methods. Mimotopes are peptides selected from randomized peptide libraries for their ability to bind to an antibody raised against a native antigen. Mimotope-based methods require the input of antibody affinity-selected peptides (i.e., mimotopes), and the 3D-structure of the selected antigen. Epitope prediction methods based on mimotopes derived from phage display experiments are available, and map mimotopes to the overlapping location patches on the antigen surface using statistical features of mimotopes, or use mimotope mapping back to the antigen sequence through alignment, which can indicate B-cell epitope location. To identify affinity-selected peptides, or mimotopes, random peptides are displayed on the surface of filamentous phages, and peptides that bind to a monoclonal antibody with a certain degree of affinity are screened, eluted and amplified. This selection process is repeated for a total of 3-5 times, narrowing down the peptides to those with the highest affinity. Mimotopes and epitopes can combine the same paratope of a monoclonal antibody and cause an immune response, and thus have similar functionality. The selected mimotopes share high sequential similarity, indicating that certain key binding motifs and physicochemical preferences exist during the interaction with the antibody. Thus, mapping mimotopes back to the source antigen can help find the true epitope more accurately. Mimotopes have similar physicochemical properties and spatial organization, but rarely show sequence similarity to the native antigen. Databases that provide information on mimotopes include, for example, ASPD (available at mgs.bionet.nsc.ru/mgs/gnw/aspd), RELIC Peptides (available upon request), PepBank (available at pepbank.mgh.harvard.edu), and MimoDB (available at immunet.cn/mimodb). In silico mimotope-based prediction tools are essential for mapping mimotopes back to the surface of the source antigen, in order to locate the best alignment sequences and predict possible epitope regions. In silico B-cell epitope prediction tools based on mimotope analysis include, for example, MIMOX (available at immunet.cn/mimox/), MimoPro (available at informatics.nenu.edu.cn/MimoPro), Pep-3D-Search (available at kyc.nenu.edu.cn/Pep3DSearch), MIMOP/MimCons (available upon request), MIMOP/MimAlign (available upon request), LocaPep (available at atenea.monstes.upm.es/#soft), EpiSearch (available at curie.utmb.edu/episearch.html), Pepitope/PepSurf (available at pepitope.tau.ac.il/sources.html), PepMapper (available at informatics.nenu.edu.cn/PepMapper/), FINDMAP (not available online), EPIMAP (not available online), MEPS (available at capsur.it/meps), 3DEX (3D-Epitope-Explorer; not available online), Mapitope (available at pepitope.tau.ac.il), and SiteLight (not available online) (see, e.g., Potocnakova et al. (2016) Journal of Immunology Research, Article ID 6760830; Sanchez-Trincado et al. (2017) Journal of Immunology Research, Article ID 2680160; Sun et al. (2013) Comput. Math Method M., Article ID 943636).

[1015] ii. In Silico Prediction of T-Cell Epitopes

[1016] Linear T-cell epitopes bind to MHC via the interaction of their amino acid side chains with binding pockets in the MHC epitope-binding groove, and the presence or absence of specific side chains determines if, and how tightly, a T-cell epitope binds to MHC. For in silico predictions, there are databases that provide libraries of existing epitopes, such as, for example, IEDB, Epitome, and SEDB, which provide information on two dimensional T-cell epitopes. Other in silico T-cell epitope databases include CED, AntiJen, Bcipep, and the HLA Epitope Registry. There are several webpages and programs available, that can be used to analyze sequences and predict immunogenic epitopes on protein therapeutic candidates. For example, a number of MHC-binding motif-based tools that scan protein sequences for potential T-cell epitopes are available. These T-cell epitope mapping tools include, for example, EpiMatrix, IEDB, SYFPEITHI, MHC Thread, MHCPred, MHCPred 2.0, EpiJen, NetNMC, NetCTL, nHLAPred, SVMHC, and Bimas (see, e.g., De Groot, A. S. and Moise, L. (2007) Curr. Opin. Drug Discov. Devel. 10(3):332-340). For example, the MHCPred algorithm provides information on the MHC binding potential of an amino acid sequence to various alleles, and EpiMatrix/JanusMatrix predicts allele specific binding of protein therapeutics to MHC class II receptors, and can assess binding at the T-cell receptor interface. Other algorithms and programs for epitope prediction include, for example, ProPred, MMBPred, and Protean 3D. Epitope prediction should be combined with in vitro methods and activity assessment, to ensure that any modifications to remove immunogenic sequences retain the therapeutic protein's activity (see, e.g., Dingman et al. (2019) J. Pharm. Sci. 108(5):1637-1654).

[1017] iii. Peptide-MHC Class II Binding Prediction

[1018] Structure-based methods for identifying T-cell epitopes rely on modeling the peptide-MHC structure, and evaluating the interaction using molecular dynamic simulations, for example. Structure-based methods are computationally intensive and have lower predictive performance than data-driven methods. Structure-based T-cell epitope prediction tools include EpiDOCK (available at epidock.ddg-pharmfac.net). Data-driven methods for peptide-MHC binding predictions are based on peptide sequences that are known to bind to MHC molecules; the peptide sequences are available in epitope databases, such as IEDB, EPIMHC, AntiJen, and others described herein and known in the art. Peptide-MHC binding predictions can be based on sequence motifs (SMs), which include frequently occurring amino acids at particular positions (anchor residues) that are known to bind MHC molecules. Motif matrices (MM) evaluate the contribution of every residue, including non-anchor residues, to the binding of MHC molecules, but do not account for binding affinities. Quantitative affinity matrices (QAMs) predict peptide-MHC binding as well as binding affinities. Quantitative structure-activity relationship (QSAR) additive models predict the binding affinity of peptides to MHC as the sum of amino acid contributions at each position, plus the contribution of adjacent side chain interactions. Machine learning (ML), which is the most popular and robust approach, uses algorithms that are trained on data sets consisting of peptides that either bind or do not bind MHC molecules, and examples of ML-based discrimination models include those based on artificial neural networks (ANNs), support vector machines (SVMs), decision trees (DTs), and Hidden Markov Models (HMMs) (see, e.g., Sanchez-Trincado et al. (2017) Journal of Immunology Research, Article ID 2680160).

[1019] Models to predict the immunogenicity of protein therapeutics include in silico peptide-MHC class II algorithms, which predict, with reasonable accuracy, the ability of a peptide sequence to bind to MHC class II. Such algorithms allow for the rapid screening of libraries of sequences. In silico and in vitro MHC class II binding analyses, however, lead to high levels of false positives, in which the identified immunogenic peptides fail to stimulate T-cell responses in vitro and in vivo. Such analysis does not take into account other factors that influence the formation of epitopes, such as protein processing, recognition by T-cell receptors (TCRs) and T-cell tolerance to peptides. To address this, in vitro T-cell assays are used. The combination of in silico analysis and in vitro assays is very useful for the identification of epitopes, and for the design of peptide variants with epitope-depleted protein sequences that have a reduced capacity for MHC binding (see, e.g., Baker et al. (2010) Self/Nonself 1(4):314-322).

[1020] The prediction of T-cell epitopes via peptide-MHC binding models also is complicated by MHC polymorphism; in humans MHC molecules are known as human leukocyte antigens (HLAs), and there are hundreds of allelic variants of class I and class II HLA molecules that bind different peptides and require specific models for predicting peptide-MHC binding (see, e.g., Sanchez-Trincado et al. (2017) Journal of Immunology Research, Article ID 2680160). T-cell epitope prediction tools based on peptide-MHC binding models include, for example, EpiDOCK, MotifScan, Rankpep, SYFPEITHI, MAPPP, PREDIVAC, PEPVAC, EPISOPT, Vaxign, MHCPred, EpiTOP, BIMAS, TEPITOPE, Propred, Propred-1, EpiJen, IEDB-MHCI, IEDB-MHCII, IL4pred, MULTIPRED2, MHC2PRED, NetMHC, NetMHCII, NetMHCpan, NetMCHIIpan, nHLApred, SVMHC, SVRMHC, NetCTL, and WAPP (see, e.g., Sanchez-Trincado et al. (2017) Journal of Immunology Research, Article ID 2680160).

[1021] EpiSweep is a suite of protein design algorithms that integrates computational predictions of immunogenic T-cell epitopes with sequence-based or structure-based assessment of the effects of epitope-deleting mutations on protein stability, structure and function, allowing for the selection of combinations of mutations that optimize the protein therapeutic for low immunogenicity and high activity and stability (see, e.g., Choi et al. (2017) Methods Mol. Biol. 1529:375-398, for a step-by-step guide to the application of the EpiSweep suite of deimmunization algorithms).

[1022] c. In Vitro Epitope Prediction Methods

[1023] In vitro methods can be used to determine cellular mechanisms of the immune response, to identify immunogenic epitopes, and to assess MHC affinity, T-cell proliferation, and immunogenic effects of the whole protein therapeutic. For example, epitope mapping identifies immunogenic epitopes by analyzing peptide fragments individually. The peptide fragments are exposed to immune cells, and immunogenicity is determined by measuring cytokines and surface markers that are indicative of an inflammatory immune response. Epitope mapping of a full protein is labor intensive, and in silico programs are used in conjunction with mapping to identify regions that may be immunogenic and narrow down epitope candidates. In vitro epitope prediction methods include, for example, structural epitope mapping methods, such as X-ray crystallography, nuclear magnetic resonance and electron microscopy methods, and functional epitope mapping, such as antigen fragmentation/antigen binding assays, competitive binding assays, modification testing/mutagenesis, display technologies, such as phage display and yeast display, and mimotope analysis.

[1024] i. In Vitro B-Cell Epitope Prediction Methods

[1025] Experimental methods for identifying B-cell epitopes include, for example, solving the 3D structure of antigen-antibody complexes, screening peptide libraries for antibody binding, or performing function assays where the antigen is mutated and the effects on antigen-antibody interaction are analyzed. Antibody-producing B-cells recognize structural epitopes, which are ˜16-22 residues in size, and contain amino acids that come into contact with the antibody, and functional epitopes, which are ˜3-5 residues in size and affect the affinity between the protein and the antibody. The most accurate method to identify structural epitopes is by X-ray crystallography of antigen-antibody complexes, which identifies sequences that bind to the antibody, can be used to locate the exact position of an epitope within the protein structure, can identify both continuous and discontinuous epitopes, and provides information on the strength of binding. Structural epitope mapping identifies residues in direct contact with an antibody, but does not always provide information on which residues contribute to the binding strength. The FTProd program, which is freely available, can be used as a computational alternative to X-ray crystallography. Nuclear magnetic resonance (NMR) can be used to identify structural epitopes without the need to generate crystals, but its use is limited to small proteins and peptides that are <25 kDa in size. NMR provides data about the structure, dynamics, and binding energy of antigen-antibody complexes, and is performed in solution, obviating the need for generating crystals. Two additional methods for epitope mapping with moderate resolution include saturation transfer difference NMR, and antibody inhibition of hydrogen-deuterium exchange in the antigen. Electron microscopy also can be used for epitope mapping, but it is a low resolution structural method that is typically used for larger antigens, such as whole viral particles or viral capsids. Electron microscopy cannot detect contact residues, but can be used to confirm the epitope's surface accessibility. Cryoelectron microscopy is an alternative method in which rapidly frozen antigen-antibody complexes are observed in physiological buffers, obviating the need for stains and fixatives (see, e.g., Dingman et al. (2019) J. Pharm. Sci. 108(5):1637-1654; Potocnakova et al. (2016) Journal of Immunology Research, Article ID 6760830).

[1026] Functional epitopes can be identified by a variety of methods, including antigen fragmentation, competitive binding, and modification testing. For example, functional B-cell epitope mapping methods generally include screening of antigen-derived proteolytic fragments or peptides for antibody binding, and testing the antigen-antibody reactivity of mutant proteins that have been subjected to site-directed or random mutagenesis. Functional epitope mapping tools, thus, are used to identify and characterize residues within epitopes that are important for antibody binding. The majority of functional methods detect the binding of antibody to antigen fragments, synthetic peptides, or recombinant antigens, such as mutated variants, antigens arrayed by in situ cell-free translation, and/or expressed using selectable systems such as phage display. For example, antigen fragmentation and binding assays involve the immobilization of peptides on a solid support, and the use of Western blot, dot blot, and/or ELISA to determine whether an epitope fragment binds an antibody; binding indicates that the peptide fragment may be immunogenic. Competitive binding assays, which provide low-resolution mapping, provide information on the number of potentially immunogenic epitopes on a protein, by assessing whether multiple antibodies can bind to epitopes on the protein at the same time, or if they compete with each other for binding to the same epitope (see, e.g., Dingman et al. (2019) J. Pharm. Sci. 108(5):1637-1654; Potocnakova et al. (2016) Journal of Immunology Research, Article ID 6760830).

[1027] Modification testing, or mutagenesis, is an epitope mapping method in which individual residues (referred to as hot-spots) in a functional epitope are substituted, and the effects of the modifications on binding of the antibody to the immunogenic sequence are assessed. Hot-spots, which most frequently include Tyr, Arg and Trp residues, are energetically important residues that contain a fraction of the complete protein-protein interface area. Mutation of individual residues allows for the identification of detrimental residues which can be replaced, provided that the protein retains its structure and activity. For epitope mapping via mutagenesis, a peptide library is generated by random or site-directed mutagenesis; the combination of mutagenesis with display techniques allows for the screening of large numbers of mutated proteins. Saturation mutagenesis is another method for epitope mapping, in which an amino acid residue at a particular position within the epitope is replaced with all 20 naturally occurring amino acids, and loss of antibody binding is monitored. A disadvantage to this method is that the loss of immunoreactivity can be due to the disruption of antigenic structure, rendering the interpretation of results difficult. Most of the contacts made between an epitope and antibody occur via amino acid side chains, and alanine scanning mutagenesis can be used to define the contributions that each residue side chain makes to antibody binding. This is performed by sequential alanine substitution of each non-alanine residue, one at a time, which truncates sides chains to the β-carbon without adding flexibility to the protein backbone. This method identifies critical residues whose side chains make the highest energetic contributions to the paratope-epitope interaction. Computational alanine scanning also can be used to rapidly determine the effect of alanine mutation on a binding free energy in protein-protein complexes by using a simple free energy function. Combinatorial mutagenesis is based on the combinatorial randomization of a discrete antigenic region, and the grouping of mutated residues (primary sequence proximity), to maximize the chances of identifying combined effects mediated by neighboring residues; this allows for the identification of residues that are not critical for binding, but that contribute to the formation of the epitope, or that form multiple interactions with the paratope that individually are weak. Shotgun mutagenesis is a high throughput method, based on large-scale mutagenesis, in which each clone has a defined amino acid mutation (e.g., alanine substitution), and involves direct cellular testing for mAb reactivity of natively folded proteins. Shotgun mutagenesis allows for the identification of both linear and conformational epitopes with mapping rates of over 20 epitopes/month (see, e.g., Potocnakova et al. (2016) Journal of Immunology Research, Article ID 6760830).

[1028] Other techniques for epitope mapping include display technologies and mimotope analysis, which are inexpensive, flexible and fast. Display technologies, such as phage display and yeast display, are based on testing the binding capacity of a variety of peptides displayed on the display platforms (e.g., tethering peptides to ribosomes-mRNA complex, or to the surface of phage, bacteria, mammalian, insect or yeast cells) to the mAb of interest through the affinity selection method of biopanning (see, e.g., Potocnakova et al. (2016) Journal of Immunology Research, Article ID 6760830).

[1029] ii. In Vitro T-Cell Epitope Prediction Methods

[1030] In vitro methods, such as MHC or HLA binding assays and T-cell assays, can be used to predict T-cell epitopes and evaluate T-cell responses to a protein therapeutic antigen. The synthesis of hundreds or thousands of overlapping peptides for in vitro assays is a limiting factor that can be overcome by the use of in silico epitope prediction tools that can accurately model the MHC:epitope interface and predict immunogenic peptide sequences (see, e.g., De Groot, A. S. and Moise, L. (2007) Curr. Opin. Drug Discov. Devel. 10(3):332-340)

[1031] MHC/HLA Binding Assays

[1032] T-cell epitope prediction identifies the shortest peptide sequences within an antigen that stimulate CD8⁺ or CD4⁺ T cells, which, thus, are immunogenic. The immunogenicity of T-cell epitopes depends on antigen processing, peptide binding to MHC molecules, and recognition by a cognate TCR; MHC-peptide binding is the most selective process and a primary basis for predicting T-cell epitopes. MHC binding assays can be used to detect high affinity peptides, and often are applied in conjunction with epitope mapping to identify regions of the protein that are likely to be immunogenic. In vitro MHC class II binding assays include cell-based binding assays and soluble HLA binding assays. High throughput MHC binding assays involve incubating various doses of peptides of interest with control peptides and soluble MHC proteins to assess binding affinity; high affinity peptides bind more strongly to MHC and the epitopes are more likely to be recognized by T-cells. For example, MHC II:epitope binding can be evaluated by measuring the ability of exogenously added peptides to bind to the surface of lymphoblastoid cell line B-cells expressing MHC class II alleles, and competition-based HLA assays can be adapted for high throughput screening. MHC binding assays to identify potentially immunogenic epitopes are commercially available, for example, from ProImmune (see, e.g., Dingman et al. (2019) J. Pharm. Sci. 108(5):1637-1654; De Groot, A. S. and Moise, L. (2007) Curr. Opin. Drug Discov. Devel. 10(3):332-340; Sanchez-Trincado et al. (2017) Journal of Immunology Research, Article ID 2680160).

[1033] iii. In Vitro T-Cell Assays

[1034] The presence of T-cell epitopes in a protein therapeutic can be detected by assessing T-cell responses in vitro in T-cell assays. T-cells proliferate and release cytokines upon stimulation by an immunogenic protein. T-cell epitopes induce the secretion of cytokines, such as IL-2, IL-4, IL-5 and IFNγ by effector T-cells, and induce the secretion of the cytokines TGFβ and TNFα, and chemokines, such as MIP1α/1β, by regulatory T-cells (Tregs). The proliferation of T-cells in response to immunogenic peptides/epitopes can be measured by radiolabeling with thymidine or by labeling with fluorescent dyes, such as carboxyfluorescein succinimidyl ester (CFSE). ELISA or ELISpot methods, as well as flow cytometry, can be used to measure the levels of cytokines, such as IL-2 and IFN-γ, that are secreted by T-cells, to determine immunogenicity. ELISpot methods are highly sensitive and can detect individual T-cells directly from splenocytes or peripheral blood, as well as measure the number of antigen-specific T-cells that secrete specific cytokines. ELISpot assays for measuring IL-2 and IL-4, for example, are commercially available. Flow cytometry also can be used to measure T-cell responses, whereby T-cells that respond to a particular epitope can be directly labeled using tetramers (MHC class II:epitope complexes). T-cell proliferation and cytokine release assays can be combined with T-cell phenotyping to classify the type of T-cell response that occurs. The number and phenotype of T-cells responding to an antigen can be determined using methods such as flow cytometry, by identifying cell surface markers, such as CD25 for effector T-cells, and FoxP3 for Tregs, and/or by identifying intracellular cytokine expression. Thus, identification of T-cell epitopes can be coupled with phenotypic studies, to evaluate if the immune response will be inflammatory or suppressive. Peripheral blood mononuclear cell (PBMC) assays, which use PBMC preparations include several types of immune cells (e.g., CD4⁺ and CD8⁺ T-cells), better mimic in vivo immune systems, and can be used to assess the immunogenicity of a protein, and the potential immune response, without testing in humans. The PBMCs are stimulated with whole therapeutic proteins, or with peptides derived from therapeutic proteins, in in vitro cultures. Innate immune screening, using innate cell systems, such as PBMC preparations lacking CD8⁺ reactive T cells, or innate lymphoid cells (ILCs), can be used to distinguish the innate and adaptive immune responses to immunogenic proteins. To be useful, in vitro T-cell assays should test peptides against PBMCs from large cohorts of donors with a broad spectrum of MHC class II allotypes. In vitro T-cell assays can provide information on the number and potency of T-cell epitopes, which can be used to determine the risk of immunogenicity during preclinical development, and to guide the removal of such epitopes by targeted amino acid substitutions (see, e.g., Baker et al. (2010) Self/Nonself 1(4):314-322; Dingman et al. (2019) J. Pharm. Sci. 108(5):1637-1654; De Groot, A. S. and Moise, L. (2007) Curr. Opin. Drug Discov. Devel. 10(3):332-340).

[1035] d. In Vivo Epitope Prediction Methods

[1036] In vivo assessments of immunogenicity of protein therapeutics in humans use animal models, such as mice. In general, any human or humanized protein therapeutic can be immunogenic when administered to a non-human animal. Animal models, however, are useful for the prediction of immunogenicity, the comparison of the relative immunogenicity between products, drug formulations or administration routes, the determination of the immunogenicity of aggregates, and the elucidation of immune mechanisms. Adoptive transfer and T-cell proliferation studies in animal models can be used to determine the role of T-cells and B-cells in protein immunogenicity. Immunogenicity of human protein therapeutics cam be difficult to assess in animals, because animal MHC receptors do not directly mimic human HLA receptors, and because HLA and MHC genes are highly polymorphic, with high inter-subject variability in HLA/MHC expression. To overcome these limitations, HLA transgenic mice have been generated that mimic a human subject, and that can be tolerized to a particular protein; the mouse will tolerate the protein therapeutic being assessed, and any immunogenicity that develops is due to the breaking of self-tolerance, and not due to a classical immune response to foreign antigens. In vivo methods to determine the immunogenicity of a protein therapeutic include the exposure of HLA-transgenic mice to the whole protein or to epitope peptides. Several transgenic mouse strains, expressing common HLA gene products, such as HLA-A, HLA-B and HLA-DR molecules, have been generated, and can be used to measure T-cell responses, as well as antibodies induced by exposure to the protein therapeutic, by ELISA and neutralizing antibody assays. B-cell epitopes in a protein therapeutic also can be identified by immunizing HLA transgenic mice with the protein (see, e.g., see, e.g., Dingman et al. (2019) J. Pharm. Sci. 108(5):1637-1654; De Groot, A. S. and Moise, L. (2007) Curr. Opin. Drug Discov. Devel. 10(3):332-340).

[1037] NOD scid gamma (NSG) mice, which are highly immunocompromised and lack most immune cells as well as complement and cytokine signaling, can be transfected to investigate the human immune system in an in vivo model. For example, CD34⁺ humanized NSG mouse models are engrafted with cord blood-derived hematopoietic stem cells to develop a functional immune system with normal T-cell and inflammatory function. Animal models also include non-human primates, such as rhesus monkeys and chimpanzees, which are more useful in predicting protein immunogenicity, because their proteins exhibit a higher degree of homology with human proteins, and because their immune mechanisms are similar to those of humans (see, e.g., Dingman et al. (2019) J. Pharm. Sci. 108(5):1637-1654).

[1038] e. Removal of Predicted B-Cell and T-Cell Epitopes (De-Immunization)

[1039] As described herein, the prediction and removal of immunogenic epitopes from protein therapeutics (i.e., de-immunization) can increase the efficacy and safety of the constructs provided herein, and reduce the likelihood or prevent adverse effects. For example, the removal of identified epitopes, such as B-cell epitopes, can prevent the formation of ADAs, which reduce the efficacy of administered protein therapeutics by neutralizing the therapeutics and/or by inducing their rapid elimination from the body.

[1040] De-immunization of protein therapeutics involves the identification of highly immunogenic B-cell and/or T-cell epitopes, and deletion of the identified epitopes by mutagenic substitution of key amino acid residues. As discussed above, prediction and assessment of immunogenic regions within a protein therapeutic sequence includes the use of various in silico, in vitro, and in vivo methods. Upon the identification of an immunogenic epitope, the amino acid sequence of the epitope is modified by random or site-directed mutagenesis, to remove the immunogenic sequence and de-immunize the epitope. For example, most of the contacts made between an epitope and antibody occur via amino acid side chains, and alanine scanning mutagenesis can be used to define the contributions that each residue side chain makes to antibody binding. This is performed by sequential alanine substitution of each non-alanine residue, one at a time, to identify critical residues whose side chains make the highest energetic contributions to the paratope-epitope interaction. The prediction and mutagenic deletion of immunogenic epitopes, however, is not sufficient for protein de-immunization, as the protein must retain its folded, stable and active structure in order to retain its therapeutic efficacy; epitope-deleting mutations that are compatible with the protein's structure and function must be selected.

[1041] There are in silico tools to increase the efficiency of this process. For example, programs are available that sequentially replace each amino acid in the immunogenic sequence with one of the other 19 naturally occurring amino acids, and then re-evaluate the immunogenicity of the new sequences. For example, OptiMatrix is a tool that iteratively substitutes all 20 amino acids in any given position of a peptide sequence, and then re-analyzes the predicted immunogenicity of the modified sequence (see, e.g., De Groot, A. S. and Moise, L. (2007) Curr. Opin. Drug Discov. Devel. 10(3):332-340). EpiSweep is a suite of protein design algorithms that integrates computational predictions of immunogenic T-cell epitopes with sequence-based or structure-based assessment of the effects of epitope-deleting mutations on protein stability, structure and function, allowing for the selection of combinations of mutations that optimize the protein therapeutic for low immunogenicity and high activity and stability (see, e.g., Choi et al. (2017) Methods Mol. Biol. 1529:375-398, for a step-by-step guide to the application of the EpiSweep suite of deimmunization algorithms). Computational alanine scanning also can be used to rapidly determine the effect of alanine mutation on a binding free energy in protein-protein complexes by using a simple free energy function (see, e.g., Potocnakova et al. (2016) Journal of Immunology Research, Article ID 6760830).

### G. PAN-GROWTH FACTOR TRAP CONSTRUCTS

[1042] 1. Receptor Tyrosine Kinases (RTKs)

[1043] Receptor tyrosine kinases (RTKs) are high-affinity cell surface receptors for many polypeptide growth factors, cytokines, and hormones. RTKs are involved in many signal transduction pathways, and play a role in a variety of cellular processes, including cell division, proliferation, differentiation, migration and metabolism. RTKs can be activated by ligands that bind specifically to their cognate receptors. Such activation, in turn, activates events in a signal transduction pathway, such as by triggering autocrine or paracrine cellular signaling pathways, for example, activation of second messengers, which results in specific biological effects. Approximately 20 different classes of RTKs have been identified, which include, for example, the epidermal growth factor receptor (EGFR) family (class I, also known as the ErbB family); the insulin receptor family (class II); the platelet-derived growth factor receptor (PDGFR) family (class III); the vascular endothelial growth factor receptor (VEGFR) family (class IV); the fibroblast growth factor receptor (FGFR) family (class V); the hepatocyte growth factor receptor (HGFR) family (class VIII); and the Eph receptor family (Ephs, after erythropoietin-producing human hepatocellular receptors; class IX), among others.

[1044] RTKs are associated with regulating pathways involved in angiogenesis, including physiologic and tumor blood vessel formation, and are implicated in the regulation of cell proliferation, migration and survival. RTKs have been implicated in a number of diseases, including autoimmune diseases and cancers, such as breast and colorectal cancers, gastric carcinomas, gliomas and mesodermal-derived tumors. Dysregulation of RTKs has been associated with several cancers. For example, breast cancer has been associated with amplified expression of p185-HER2. RTKs also have been associated with ocular diseases, including diabetic retinopathies and macular degeneration. Additionally, members of the epidermal growth factor receptor (EGFR) family, as well as EGF-like growth factors (ligands), have been shown to be overexpressed in synovial fibroblasts and macrophages in patients with rheumatoid arthritis (RA).

[1045] a. Human Epidermal Growth Factor Receptor (HER) Family

[1046] Among the RTKs associated with disease is the class I human EGFR (HER; also referred to as the ErbB) family of receptors, which includes HER1/EGFR (ErbB1), HER2 (ErbB2/Neu), HER3 (ErbB3) and HER4 (ErbB4). HER1, HER3 and HER4 collectively bind over 11 canonical ligands, including epidermal growth factor (EGF), transforming growth factor (TGF)-α, heparin-binding (HB)-EGF, amphiregulin, β-cellulin (BTC), epiregulin, epigen, and neuregulin (NRG)1-4. HER2 does not bind any of these ligands, but acts as a signal amplifier by heterodimerization with other HER family members, such as HER3 and HER4 (see, e.g., Jin et al. (2009) Mol. Med. 15(1-2):11-20). HER1, HER2 and HER4 are active as tyrosine kinases, whereas HER3 is inactive as a kinase (despite having a kinase domain), and signals via the phosphatidylinositol 3-kinase pathway.

[1047] All members of the HER family have an extracellular ligand-binding domain, a single transmembrane domain, and a cytoplasmic tyrosine-kinase-containing domain. The extracellular region of each HER family member contains four subdomains, L1, CR1, L2 and CR2, where “L” refers to a leucine-rich repeat domain and “CR” refers to a cysteine-rich region/domain (also known as a furin-like repeat domain); the four subdomains also are referred to as domains I-IV, respectively. Domains I and III are ligand-binding domains, and domains II and IV mediate binding to each other and to other members of the receptor family. Domain II contains sequences required for dimerization, known as the dimerization arm, and domain IV contains sequences which allow for domain II/IV tethering, with the exception of HER2, which does not undergo a tethered conformation. In the absence of ligands, EGFR, HER3 and HER4 subdomains II and IV form an intramolecular auto-inhibitory tether. Upon ligand binding, the subdomains undergo conformational changes, allowing subdomains I and III to form a high-affinity ligand-binding pocket. It has been shown that mutagenic disruption of the tether formed by subdomains II and IV, or C-terminal deletion of subdomain IV, increases ligand-binding affinity by up to 15-fold (see, e.g., Jin et al. (2009) Mol. Med. 15(1-2):11-20).

[1048] HER family members are expressed in various tissues of epithelial, mesenchymal and neuronal origin. Under normal physiological conditions, activation of the HERs is controlled by the spatial and temporal expression of their ligands, which are members of the EGF family of growth factors. Ligand binding induces the formation of receptor homodimers and multiple combinations of heterodimers, leading to the activation of the intrinsic kinase domain, self-phosphorylation of specific tyrosine residues in the cytoplasmic tail, the recruitment and phosphorylation of several intracellular proteins, and coupling to multiple downstream signaling cascades. The activated signaling pathways include the Ras-Raf-mitogen-activated protein kinase mitogenic pathway, the phosphatidylinositol 3-kinase-AKT cell survival pathway, and the stress-activated protein kinase C and Jak/Stat pathways. The induced signaling pathways result in a variety of cellular responses, including, for example, cell migration, invasion, proliferation, survival, and differentiation (see, e.g., Sarup et al. (2008) Mol. Cancer Ther. 7(10):3223-3236).

[1049] b. Diseases Associated with the Human Epidermal Growth Factor Receptor (HER) Family and their Ligands

[1050] Dysregulation of members of the HER family, as well as their ligands, by overexpression or due to mutations, has been shown to play a role in cancer and other diseases. For example, HER1 and HER2 have been implicated in the development and pathology of many human cancers, and alterations in these receptors have been associated with more aggressive disease and with poor clinical outcome. TGF-α overexpression has been associated with prostate, pancreatic, lung, ovarian, and colon cancers, while NRG1 overexpression has been associated with mammary adenocarcinomas. HER1 overexpression has been associated with gliomas, and head and neck, breast, bladder, prostate, kidney and non-small cell lung cancers, and mutations in HER1 have been associated with gliomas, as well as lung, breast and ovarian cancers. HER2 overexpression has been associated with breast, lung, pancreatic, colon, esophageal, endometrial and cervical cancers; HER3 has been associated with breast, colon, gastric, prostate and oral squamous cell cancers; and HER4 has been associated with breast and prostate cancers, as well as childhood medulloblastoma (see, e.g., Yarden et al. (2001) Nat. Rev. Mol. Cell Biol. 2:127-137).

[1051] The EGF family of ligands and receptors has been shown to play a role in the development of inflammatory arthritis. For example, the expression of HER2, and the presence of the EGFR ligands EGF, amphiregulin and TGF-α, have been detected in the RA synovium. Adenoviral delivery of the human EGFR family inhibitor herstatin, an alternative splice variant of HER2, has been shown to abrogate all clinical signs of collagen-induced arthritis (CIA) in mice. Herstatin disrupts dimerization, and acts as a natural inhibitor of native HER1, HER2 and HER3. A patient with long-standing RA, who had previously been treated with rituximab and adalimumab, experienced a significant reduction in joint pain following treatment with the anti-EGFR/HER1 antibody cetuximab for head and neck cancer. These results indicate that HER-targeted treatments can be therapeutically useful in the treatment of autoimmune and inflammatory conditions, such as rheumatoid arthritis (RA) (see, e.g., Gompels et al. (2011) Arthritis Research & Therapy 13.R161).

[1052] Macrophages are a source of TNF in the chronically inflamed RA joint tissue. Phenotypic analysis of macrophages from the synovial tissues of patients with RA revealed an abundance of HBEGF⁺ (heparin binding EGF-like growth factor⁺) inflammatory macrophages, that overexpress the proinflammatory genes NR43A (nuclear receptor sub-family 4 group A member 3), PLAUR (plasminogen activator, urokinase receptor), and CXCL2, and the growth factors HB-EGF and epiregulin (EGFR family ligands). HBEGF⁺ inflammatory macrophages also produced the proinflammatory cytokine IL-1 and promoted synovial fibroblast invasiveness in an epidermal growth factor receptor-dependent manner. It was shown that the majority of medications used to treat RA targeted HBEGF⁺ macrophages in an ex vivo synovial tissue assay, and an EGFR inhibitor effectively blocked the macrophage-induced fibroblast response in RA tissue in an ex vivo assay, indicating that blockade of EGFR responses can provide a non-immunosuppressive therapeutic approach for RA (see, e.g., Kuo et al. (2019) Sci. Transl. Med. 11(491)). Such an approach is advantageous over the use of traditional anti-TNF therapies, which are immunosuppressive and are often associated with the development of serious infections, such as tuberculosis.

[1053] HER family signaling also has been associated with coronary atherosclerosis, which involves the migration of vascular smooth muscle cells in the arterial intima. Activation of the thrombin receptor is required for smooth muscle cell migration and proliferation, and activation of this G-protein-coupled receptor relies on transactivation by HER1/EGFR in response to HB-EGF. EGFR expression also is associated with psoriasis; in normal skin, the expression of EGFR is limited to the basal layer, whereas in patients with psoriasis, EGFR and its ligand amphiregulin are highly expressed throughout the entire epidermal layer (see, e.g., Yarden et al. (2001) Nat. Rev. Mol. Cell Biol. 2:127-137).

[1054] Other HER-mediated diseases and conditions include neurodegenerative diseases and conditions, such as multiple sclerosis, Parkinson's disease, schizophrenia and Alzheimer's Disease. For example, several diseases and conditions are associated with, e.g., caused by, or aggravated by, exposure to one or more neuregulin (NRG) ligands, such as NRG1, including type I, II, and III, NRG2, NRG3, and/or NRG4. Examples of NRG-associated diseases include neurological or neuromuscular diseases, including schizophrenia and Alzheimer's disease (see, e.g., U.S. Publication No. 2010/0055093).

[1055] Due to their role in cancer and other proliferative diseases, rheumatoid arthritis, neurodegenerative diseases and autoimmune diseases, HERs are targets for therapeutic intervention. Anti-HER therapeutics include antibodies targeted to the extracellular domain (or ectodomain), referred to herein as the ECD, and small molecule tyrosine kinase inhibitors. Therapeutics approved for the treatment of cancers driven by the HER family of proteins include monoclonal antibodies, such as trastuzumab (directed at HER2), pertuzumab (directed at HER2), panitumumab (directed at HER1/EGFR) and cetuximab (directed at HER1/EGFR), and small molecule tyrosine kinase inhibitors, such as the HER1 kinase inhibitors gefitinib and erlotinib, and the dual HER2 kinase and HER1 kinase inhibitor lapatinib. For example, trastuzumab is used for the treatment of HER2-overexpressing node-positive or node negative breast cancer; cetuximab is used for the treatment of metastatic colorectal cancer, as well as head and neck cancer; panitumumab is used for the treatment of metastatic colorectal cancer; lapatinib is used as a frontline therapy for triple-positive breast cancer and as an adjuvant therapy for patients who have progressed on trastuzumab; and erlotinib is used to treat non-small cell lung cancer and pancreatic cancer.

[1056] Anti-HER therapeutics exhibit limited efficacy and limited duration of response. Trastuzamab (sold, for example, as Herceptin®) is a humanized version of a murine monoclonal antibody, and targets the extracellular domain of HER2. The effectiveness of trastuzumab, however, requires high expression (at least 3- to 5-fold overexpression) of HER2, and, as a result, fewer than 25% of breast cancer patients qualify for treatment. Among this population, a large proportion fail to respond to treatment. In addition, small molecule tyrosine kinase inhibitors often lack specificity. With the exception of patients that highly express HER2 and are treated with trastuzumab in combination with chemotherapy, the efficacy observed with single-targeted anti-HER antibodies or small molecule tyrosine kinase inhibitors is in the range of 10-15%. Treatments, particularly those directed at only one HER family member, also suffer from intrinsic or acquired resistance, which is associated with the co-expression and ligand activation of other RTKs, particularly other HER family members. For example, drug resistance is often associated with the up-regulation of, or compensation by, other HER family members, such as HER3 and HER4, or increased expression of HER1 or HER3 ligands by tumor cells. The homodimerization and heterodimerization among members of the HER family of receptors also has implications for therapies directed against a single HER family receptor. Because of the limited effectiveness of the available therapies, alternative anti-HER therapies are required. Provided herein are alternative, more effective therapies for targeting the HER family of RTKs and their ligands.

[1057] 2. Pan-Growth Factor Inhibition

[1058] As described herein, resistance to single-targeted anti-HER therapies, such as trastuzumab cetuximab, gefitinib and erlotinib, often is associated with the co-expression and/or upregulation of other HER family members and/or the overexpression of their ligands. One strategy to reduce or overcome this resistance, and to improve the efficacy of HER-targeted therapies, is to inhibit multiple ligand-induced HER family members simultaneously. This can be achieved, for example, by a chimeric HER ligand-binding molecule that behaves like a receptor decoy and sequesters multiple HER family ligands, preventing ligand-dependent receptor activation and downregulating aberrant HER family activity.

[1059] a. RB242 Ligand Trap

[1060] The antagonist designated RB242, which is a chimeric bi-specific ligand trap that is an Fc-mediated heterodimer of the EGFR (HER1) and HER3 ligand-binding domains, targets all four members of the EGFR/HER family. The EGFR and HER3 ligand-binding domains are dimerized by fusion of each ligand-binding domain with the Fc domain of human IgG1. In RB200, the C-termini of the extracellular domains (ECDs) of EGFR (corresponding to residues 1-621 of the mature EGFR protein, set forth in SEQ ID NO:41), and of HER3 (corresponding to residues 1-621 of the mature HER3 protein, set forth in SEQ ID NO:45), each are fused to the N-terminus of the Fc fragment of human IgG1 (corresponding to residues P100-K330 of SEQ ID NO:9), with a Gly-Arg-Met-Asp (GRMD) linker added to the N-terminus of the Fc fragment. The HER3/Fc component of RB200 contains a 6×His tag on the COOH terminus for purification.

[1061] RB200 has been shown to bind EGFR and HER3 ligands (including EGF, TGF-α, HB-EGF, amphiregulin, beta-cellulin, epiregulin, and epigen, and NRG1-α, NRG1-β1 and NRG1-β3, respectively) with high affinity, inhibit ligand-induced tyrosine phosphorylation of HER family members (HER1, HER2 and HER3), inhibit the proliferation of a diverse range of tumor cells in vitro, and suppress the growth of tumor xenografts (epidermoid carcinoma and non-small cell lung cancer) in nude mouse models. RB200 also exhibited synergy with tyrosine kinase inhibitors directed toward EGFR/HER1 and HER2 kinases, such as AG-825, erlotinib, gefitinib, or lapatinib, in the inhibition of tumor cell proliferation in vitro. The inhibition of ligand-stimulated phosphorylation of HER1, HER2 and HER3 was more effective by RB200 compared with monoclonal antibodies that target HER1 (C225) or HER2 (trastuzumab and 2C4) (see, e.g., Sarup et al. (2008) Mol. Cancer Ther. 7(10):3223-3236; Gompels et al. (2011) Arthritis Research & Therapy 13:R161).

[1062] The ligand trap designated RB242, derived from RB200, is an affinity optimized Fc-mediated triple mutant EGFR:HER3 heterodimer, comprising the mutations T15S and G564S in the EGFR ECD subdomains I and IV, respectively, with reference to the sequence of the mature EGFR protein (SEQ ID NO:41), and Y246A in the HER3 ECD subdomain II, with reference to sequence of the mature HER3 protein (SEQ ID NO:45). A HER1 (EGFR) allelic variant also contains the replacement N516K, so RB242 can have this replacement, which does not alter properties. RB242 also can have instead of knobs in holes, can have modified Fc domains to alter other properties, such as modifications that enhance neonatal Fc receptor (FcRn) recycling, and/or effector functions as described and detailed in sections below.

[1063] To express the RB200 and RB242 heterodimeric chimeric fusion protein, vectors encoding the HER1/Fc and HER3/Fc constructs were co-transfected into HEK293T cells at a ratio of 1:3 (HER1/Fc:HER3/Fc). This results in the expression of HER1/Fc and HER3/Fc homodimers, in addition to the HER1/Fc:HER3/Fc heterodimer of interest. The expressed proteins were purified by a combination of Protein-A, Ni-Sepharose and EGFR-affibody column chromatography methods. Analytic reverse-phase high performance liquid chromatography (HPLC) revealed that the RB242 heterodimer contained approximately 10% combined contamination with the two homodimers (see, e.g., Sarup et al. (2008) Mol. Cancer Ther. 7(10):3223-3236). Thus, improved methods are required to improve the yield and purity of the heterodimer.

[1064] b. RB200 and RB242 for the Treatment of Autoimmune Disease

[1065] As discussed elsewhere herein, a significant proportion of RA patients do not respond, or stop responding, to treatment with anti-TNF therapies, such as anti-TNF antibodies, which are associated with an increased risk of serious infections, including tuberculosis. Thus, alternative treatments are required. The increased expression of EGF ligands and receptors (HERs) has been documented in the synovium and synovial fluids of patients with rheumatoid arthritis (RA), indicating that therapies targeting EGFRs can be used to treat RA and other autoimmune and inflammatory diseases and disorders.

[1066] The bi-specific EGFR ligand trap RB200 (and its derivative RB242) displays a dose-dependent reduction in disease severity in collagen-induced arthritis (CIA). Mice with CIA were treated intraperitoneally with RB200 (or RB242), at a dose of 0.1 mg/kg, 1 mg/kg or 10 mg/kg, on the day of disease onset (day 1), and on days 4 and 7 of disease. Treatment with 1 mg/kg or 10 mg/kg RB200 inhibited the increase in clinical score and paw swelling in a dose-dependent manner. EGF has been shown to promote angiogenesis, and R3200-treated mice showed a reduction in CD31-immunopositive staining, reflecting a reduction in synovial vessels, and inhibition of synovial angiogenesis. Joint sections of mice treated with PBS control showed high numbers of infiltrating cells in the inflamed synovium, as well as invasion and erosion of bone by the synovium, associated with significant CD31 expression. Joints from mice treated with 1 mg/kg or 10 mg/kg RB200 were protected, with normal appearance, well-preserved joint architecture, and few CD31-positive blood vessels. These results indicate that the inhibition of EGFR-mediated responses can be for therapeutic use in the treatment of RA (see, e.g., Gompels et al. (2011) Arthritis Research & Therapy 13:R161).

[1067] The combination of TNF inhibition with an inhibitor of EGFR-mediated signaling can increase the therapeutic efficacy of anti-TNF therapies and be useful in the treatment of RA. It has been shown that the combined administration of a low dose of RB200 (0.5 mg/kg) with a sub-optimal dose of etanercept (1 mg/kg) inhibits the increase in clinical score and paw swelling, and completely abolishes CIA with a similar effectiveness to that observed with the administration of an optimal dose of etanercept (5 mg/kg) alone. In comparison, the administration of low-dose RB200 alone or low-dose etanercept alone was ineffective. A fluorescently-labeled monoclonal antibody against E-selectin can be used to localize endothelial activation in inflamed tissues in vivo, and is a sensitive, specific and quantifiable molecular imaging technique for the evaluation of CIA. The combination of low-dose RB200 and low-dose etanercept decreased the amount of E-selectin detected in the paws to levels seen in healthy animals, whereas E-selectin was detected in the paws of CIA mice that received low-dose RB200 alone, or low-dose etanercept alone. While there was a dose-dependent effect of RB200 alone and etanercept alone on joint architecture, with progressively fewer severely destroyed joints and more joints with mild or moderate destruction, the most pronounced effect was observed with the combination treatment, with 64% of joints appearing normal, compared with 0% in mice treated with either low-dose RB200 alone or low-dose etanercept alone. The combination treatment also was more effective than high-dose etanercept alone, indicating the effectiveness of combining pan-EGFR and TNF-targeted therapies in promoting joint protection (see, e.g., Gompels et al. (2011) Arthritis Research & Therapy 13:R161).

[1068] c. RB242 Ligand Trap

[1069] The ligand trap designated RB242, derived from RB200, is an affinity optimized Fc-mediated triple mutant EGFR:HER3 heterodimer, comprising the mutations T15S and G564S in the EGFR ECD subdomains I and IV, respectively, with reference to the sequence of the mature EGFR protein (SEQ ID NO:41), and Y246A in the HER3 ECD subdomain II, with reference to sequence of the mature HER3 protein (SEQ ID NO:45). Compared to the parent molecule, RB200, RB242 displayed an average of 22-fold improvement in affinity for various ligands, including EGF, TGF-α, HB-EGF and NRG1-β, and demonstrated improved anti-proliferative activity against cultured monolayer BxPC3 pancreatic cancer cells and in a mouse model of human non-small cell lung cancer. RB242 also exhibited a 10- to 60-fold improvement in the inhibition of ligand-induced HER phosphorylation, compared to RB200 (see, e.g., Jin et al. (2009) Mol. Med. 15(1-2):11-20).

[1070] 3. Optimized Multi-Specific, such as Bi-Specific, Growth Factor Trap Constructs

[1071] Provided herein are multi-specific, such as bi-specific, growth factor trap constructs, that are designed to be pan cell surface receptor therapeutics by specifically targeting more than one cell surface receptor, such as by binding to ligands for one or more receptors and/or interacting with one or more cell surface receptors, as long as the activity of more than one cell surface receptor is modulated. The constructs include those that target more than one HER family member, as well as those that target one or more HERs and additional receptors, such as a HER that contributes to or participates in the development of resistance to anti-HER therapies. The growth factor trap constructs provided herein contain multiple, in particular, two, chimeric fusion polypeptides that each contain all or a portion of the extracellular domain (ECD) of one receptor, particularly a member of the HER family, such as EGFR/HER1, HER2, HER3 or HER4, that is fused to a multimerization domain, such as the Fc of a human immunoglobulin (Ig), such as the Fc of human IgG. The ECD or portion thereof in the chimeric fusion polypeptide can be linked directly to the Fc, or indirectly, via a linker, such as a peptide linker. Typically, the C-terminus of the ECD polypeptide is linked to the N-terminus of the multimerization domain, such as an IgG Fc.

[1072] The growth factor trap constructs herein are expressed and purified as described, for example, in Sarup et al. (2008) Mol. Cancer Ther. 7(10):3223-3236; Gompels et al. (2011) Arthritis Research & Therapy 13:R161; Jin et al. (2009) Mol. Med. 15(1-2):11-20; and U.S. Patent Publication No. 2010/0055093. The following sections describe each portion of the multi-specific growth factor trap constructs provided herein.

[1073] a. The Extracellular Domain (ECD) Polypeptides

[1074] Provided herein are multi-specific, such as bi-specific, growth factor trap constructs comprising the extracellular domains (ECDs) or portion(s) thereof, of two or more cell surface receptors (CSRs). In particular embodiments, the constructs are bi-specific, heterodimeric constructs, comprising two different cell surface receptors. The constructs include a first ECD polypeptide and a second ECD polypeptide that each are linked directly or indirectly via a linker to a multimerization domain. In some embodiments, the first ECD polypeptide comprises the ECD of HER1/EGFR (corresponding to residues 1-621 of SEQ ID NO:41), or a portion thereof, and the second ECD polypeptide comprises the ECD of HER2 (corresponding to residues 1-628 of SEQ ID NO:43), HER3 (corresponding to residues 1-621 of SEQ ID NO:45), or HER4 (corresponding to residues 1-625 of SEQ ID NO:47), or a portion thereof, particularly the ECD of HER3 or HER4, or a portion thereof. In embodiments where the ECD polypeptide comprises less than the full-length ECD of a HER protein, it contains at least a sufficient portion of subdomains I, II and III for ligand binding and receptor dimerization. For example, the ECD can contain a sufficient portion of subdomains I and III for ligand binding, and/or can contain a sufficient portion of the ECD to dimerize with a cell surface receptor, including a sufficient portion of subdomain II. In some embodiments, the ECD contains subdomains I, II and III and at least module 1 of domain IV.

[1075] In some examples, the multi-specific, such as bi-specific, growth factor trap constructs contain a first ECD polypeptide that contains all or a portion of the ECD of HER1/EGFR, HER2, HER3 or HER4, in particular, EGFR/HER1, and a second chimeric polypeptide that contains the ECD from a different CSR, such as, for example, HER2, HER3, HER4, an insulin growth factor-1 receptor (IGF1-R), a vascular endothelial growth factor receptor (VEGFR, e.g., VEGFR1), a fibroblast growth factor receptor (FGFR, e.g., FGFR2 or FGFR4), a TNFR, a platelet-derived growth factor receptor (PDGFR), a hepatocyte growth factor receptor (HGFR), a tyrosine kinase with immunoglobulin-like and EGF-like domains 1 (TIE, e.g., TIE-1 or TEK (TIE-2)), a receptor for advanced glycation end products (RAGE), an Eph receptor, or a T-cell receptor.

[1076] In a particular embodiment, the first ECD polypeptide comprises the full-length ECD of HER1/EGFR (corresponding to residues 1-621 of SEQ ID NO:41), or a portion thereof (e.g., residues 1-501 of SEQ ID NO:41, which correspond to subdomains I-III and module 1 of domain IV), and the second ECD polypeptide comprises the full-length ECD of HER3 (corresponding to residues 1-621 of SEQ ID NO:45), or a portion thereof (e.g., residues 1-500 of SEQ ID NO:45, which correspond to subdomains I-III and module 1 of domain IV), where the ECD portion contains at least a sufficient portion of subdomains I and III to bind to a ligand of the HER receptor, and a sufficient portion of the ECD to dimerize with a cell surface receptor, including a sufficient portion of subdomain II. The first and second ECD polypeptides form a multimer, e.g., a dimer, through interactions of their multimerization domains. The resulting multimeric construct provided herein binds to additional ligands as compared to the first or second chimeric polypeptide alone, or homodimers thereof, and/or dimerizes with more cell surface receptors than the first or second chimeric polypeptide alone, or homodimers thereof. For example, the first and second ECD polypeptides form a heterodimer that binds to HER1 ligands and to HER3 ligands.

[1077] b. Modifications to the Extracellular Domains

[1078] In some embodiments, at least one of the ECD domains or a portion thereof, includes a modification that alters ligand binding, specificity or other activity or property, compared to the unmodified ECD polypeptide. In such multimeric constructs, a second ECD portion can be the same ECD domain, wild-type or mutated form, or can be the ECD from any other cell surface receptor. The ECD or portion thereof of each monomer is linked to a multimerization domain directly or via a linker, or is linked to a second ECD or portion thereof directly, or via a linker. For example, the modification alters ligand binding, specificity or another activity or property of the ECD or full-length receptor containing such ECD, compared to the unmodified ECD or full-length receptor, whereby the heteromultimer exhibits the altered activity or property, such as altered ligand binding or specificity. Such modifications include any that eliminate or add or enhance an activity, such as binding to an additional ligand. Exemplary of such multimeric constructs, are constructs that contain at least one HER1 ECD that contains a mutation in subdomain III that increases its affinity for a ligand other than EGF. Such increase in affinity is at least 2- to 10-fold, typically 100, 1000, 10⁴, 10⁵, 10⁶ fold or more.

[1079] In particular embodiments, the growth factor trap construct is a heterodimer containing a HER1 (EGFR) chimeric fusion polypeptide and a HER3 chimeric fusion polypeptide, wherein each chimeric fusion polypeptide comprises the ECD of the receptor linked to the Fc of human IgG1, optionally via a peptide linker. Such chimeric fusion polypeptides are referred to herein as HER1/Fc and HER3/Fc. Typically, the C-terminus of the ECD polypeptide is linked to the N-terminus of the multimerization domain, such as an IgG1 Fc.

[1080] In some examples, the HER1 portion has been enhanced for ligand binding and/or biological activity. In other examples, the HER3 portion has been enhanced for ligand binding and/or biological activity. In yet another example, both HER1 and HER3 portions have been enhanced for ligand binding and/or biological activity.

[1081] Exemplary modifications include, for example, S418F in HER1 (with reference to the sequence of the mature protein, set forth in SEQ ID NO:41), which allows the HER3 ligand NRG2-β to stimulate HER1. The resulting ECD binds to or interacts with at least two ligands, one for HER1, such as EGF, and a second for HER3, such as NRG2-β. Other modifications include, for example, the mutations T15S and G564S in the EGFR/HER1 ECD subdomains I and IV, respectively, with reference to the sequence of the mature EGFR protein (SEQ ID NO:41), and Y246A in the HER3 ECD subdomain II, with reference to the sequence of the mature HER3 protein (SEQ ID NO:45), which, when combined, result in an average of 22-fold improvement in affinity for various ligands, including EGF, TGF-α, HB-EGF and NRG1-β. Additional mutations in the HER1 ECD include E330D/G588S, S193N/E330D/G588S, and T43K/S193N/E330D/G588S, with reference to the sequence of precursor HER1 (including the signal peptide) set forth in SEQ ID NO:40, and corresponding to E306D/G564S, S169N/E306D/G564S and T19K/S169N/E306D/G564S, with reference to the sequence of the mature HER1 polypeptide, set forth in SEQ ID NO:41. These mutations increase the HER1 binding affinity for the ligands EGF, HB-EGF, and TGF-α (see, e.g., U.S. Patent Publication No. 2010/0055093).

[1082] c. The Multimerization Domain

[1083] In particular embodiments, the multimerization domain is an Fc domain, or a variant thereof, that effects multimerization. The Fc domain can be from any immunoglobulin (Ig) molecule, including from an IgG, IgM, or IgE. For example, the Fc domain can be from an IgG1, IgG2, IgG3 or IgG4, and includes the C_{H}2 and C_{H}3 domains, and optionally, all or a portion of the hinge region. In certain examples, the Fc portion is the Fc of human IgG1, optionally including all or a portion of the hinge region, and corresponding to, for example, residues 99-330, 100-330, 104-330, 109-330, 111-330, 113-330, or 114-330, of SEQ ID NO:9. Included also are the modified Fc domains as described in sections above, modified to have knobs-in-holes, and altered properties.

[1084] Each ECD polypeptide in the multi-specific growth factor trap construct is linked to the Fc directly, or indirectly via a linker, such as a chemical or a polypeptide linker, forming a chimeric fusion polypeptide (i.e., an ECD/Fc fusion polypeptide). The multimerization domains, such as the Fc domains, of each chimeric fusion polypeptide, interact (via disulfide bonds in the case of Fc domains) to form a heteromultimer, such as a heterodimer.

[1085] The linker between the ECD and Fc portions of each chimeric fusion polypeptide can be a flexible peptide linker, such as, for example, a hinge region of an IgG, or other polypeptide linker comprised of small amino acids, such as glycine, serine, threonine, and/or alanine, at various lengths and combinations. For example, the linker can be (Gly)ₙ, (GGGGS)ₙ, (SSSSG)ₙ, or (AlaAlaProAla)ₙ, where n is 1-6, or can be GKSSGSGSESKS, GGSTSGSGKSSEGKG, GSTSGSGKSSSEGSGSTKG, GSTSGSGKPGSGEGSTKG, EGKSSGSGSESKEF, Gly-Arg-Met-Asp (GRMD), Ser-Cys-Asp-Lys-Thr (SCDKT), or Glu-Lys-Thr-Ile-Ser (EKTIS) (see, SEQ ID NOs:816-834) or any other linker described elsewhere herein, or known in the art to be suitable for such purposes.

[1086] d. Modifications to the Fc Domains

[1087] The Fc domains in the growth factor trap constructs provided herein are modified to improve or enhance protein expression and purity, as well as to improve the pharmacodynamic and pharmacokinetic properties, including, for example, by extending the in vivo half-life and/or altering immune effector functions, as described below, and to result in production of heterodimers as the predominant, or only, product.

[1088] i. Introduction of Knobs-In-Holes

[1089] The Fc domain in the growth factor trap constructs provided herein can be engineered such that steric interactions promote stable interaction, and promote the formation of heterodimers over homodimers from a mixture of chimeric ECD polypeptide monomers. As discussed elsewhere herein, the introduction of “knobs-in-holes” (KiH; also known as “knobs-into-holes”) into the C_{H}3 domains of an antibody (e.g., IgG) heavy chain optimizes heterodimer production. The knobs-in-holes approach involves asymmetrically mutating interfacial residues in the C_{H}3 domains of the two Fc monomers in a complementary manner. Generally, “knobs” or protuberances are created by replacing amino acids with small side chains, with amino acids with larger side chains, such as tyrosine or tryptophan, at the interface between the C_{H}3 domains, and compensatory “holes” or cavities of identical or similar size to the knobs are created by replacing amino acids with large side chains, with amino acids with smaller ones, such as alanine or threonine. The knob and hole variants of the Fc monomers heterodimerize by virtue of the knob inserting into a correspondingly designed hole on the partner C_{H}3 domain. Knob-knob association is prevented due to steric repulsion, and hole-hole homodimers are destabilized.

[1090] In some embodiments, the Fc portions of the heterodimeric, growth factor trap constructs provided herein are engineered to contain knobs-in-holes. The knob mutation can be, for example, S354C, T366Y, T366W, or T394W, by EU numbering, which correspond to S237C, T249Y, T249W or T277W, respectively, with reference to the sequence of the human IgG1 heavy chain constant domain, set forth in SEQ ID NO:9. The hole mutation can be Y349C, T366S, L368A, F405A, Y407T, Y407A, or Y407V, by EU numbering, which correspond to Y232C, T249S, L251A, F288A, Y290T, Y290A, or Y290V, respectively, with reference to the sequence of the human IgG1 heavy chain constant domain, set forth in SEQ ID NO:9. The introduction of knobs-in-holes increases the yield of the heterodimer of interest, reduces the amount of homodimer impurities, and facilitates the protein purification process for the bi-specific, heterodimeric growth factor trap constructs provided herein, for example, when compared to RB200 and RB242.

[1091] ii. Modifications that Enhance Neonatal Fc Receptor (FcRn) Recycling

[1092] As described elsewhere herein, fusion with an IgG Fc increases the half-life of small protein therapeutics by taking advantage of neonatal Fc receptor (FcRn) binding, and also by increasing the molecular weight of the therapeutic, such that it is less rapidly cleared from the body, for example, by the kidneys. To improve the pharmacokinetics and overall pharmacology, residues within the Fc regions of the growth factor trap constructs provided herein can be mutated to increase the affinity for FcRn, generally by greater than 30-fold, further increasing the in vivo half-life.

[1093] In some embodiments, the Fc portions of the growth factor trap constructs herein are modified to enhance neonatal FcRn recycling, to increase the in vivo half-life. This can be effected by mutating residues at the interface of the C_{H}2 and C_{H}3 domains of the IgG Fc, which are responsible for binding to FcRn. Exemplary Fc modifications that increase binding to FcRn, and that can be introduced into the Fc portions of the growth factor trap constructs herein, include, but are not limited to, one or more of T250Q, T250R, M252F, M252W, M252Y, S254T, T256D, T256E, T256Q, V259I, V308F, E380A, M428L, H433K, N434F, N434A, N434W, N434S, N434Y, Y436H, M252Y/T256Q, M252F/T256D, M252Y/S254T/T256E, H433K/N434F/Y436H, N434F/Y436H, T250Q/M428L, T250R/M428L, M428L/N434S, V259I/V308F, V259I/V308F/M428L, E294del/T307P/N434Y, and T256N/A378V/S383N/N434Y, and combinations thereof (by EU numbering). Corresponding mutations by Kabat numbering and sequential numbering, with reference to the sequence of the IgG1 heavy chain constant domain set forth in SEQ ID NO:9, are set forth in Table 7 (IgG1 Fc Modifications that Enhance FcRn Binding) in the section describing Fc modifications. Other modifications, known in the art to confer enhanced or increased FcRn binding also are contemplated for use herein.

[1094] The modification of the Fc portions of the growth factor trap constructs provided herein to enhance FcRn binding and recycling, increases the in vivo half-life of the therapeutics, requiring the administration of lower doses and/or less frequent dosing, and improving the therapeutic efficacy, compared to RB200 and RB242.

[1095] iii. Effector Functions

[1096] As described herein, immune effector functions mediated by IgG Fcs include complement-dependent cytotoxicity (CDC), antibody-dependent cell-mediated cytotoxicity (ADCC; also called antibody-dependent cellular cytotoxicity), and antibody-dependent cell-mediated phagocytosis (ADCP; also called antibody-dependent cellular phagocytosis). The Fc regions of the growth factor trap constructs herein can be mutated or modified, as discussed below and elsewhere herein, to eliminate, reduce, or enhance, immune effector functions, including, for example, any one or more of CDC, ADCC and ADCP.

[1097] Since the growth factors targeted by the growth factor trap constructs are present as membrane proteins and as free (i.e., soluble) ligands, in certain embodiments, the immune effector functions, particularly ADCC, of the Fc portion in the ECD/Fc fusion polypeptides are retained. In alternative embodiments, in addition to human IgG1 Fc, other Fc regions also can be included in the ECD/Fc chimeric fusion polypeptides provided herein. For example, where effector functions mediated by Fc/FcγR interactions are to be minimized, fusion with IgG isotypes that poorly recruit complement or effector cells, and do not exhibit effector functions, such as, for example, the Fc of IgG2 or IgG4, is contemplated. This approach can be used in instances where effector functions are not required, or would be detrimental, for example, in the context of autoimmune and inflammatory diseases and disorders.

[1098] In certain examples, the Fc portion can be modified to enhance or increase immune effector functions. This can be achieved, for example, by modifications that increase binding to C1q (for CDC) and/or certain, activating FcγRs (e.g., FcγRI, FcγRIIa, FcγRIIc, FcγRIIIa and FcγRIIIb). Fc regions modified to have increased binding to Fc receptors can be more effective in facilitating the destruction of cancer cells in patients, even when linked with an ECD polypeptide. Antibodies destroy tumor cells via a number of possible mechanisms, including, for example, anti-proliferation via blockade of growth pathways, intracellular signaling leading to apoptosis, enhanced down-regulation and/or turnover of receptors, ADCC, ADCP, CDC, and promotion of the adaptive immune response. Thus, in embodiments where the growth factor trap constructs herein are used for the treatment of cancer, the Fc portions of the constructs can be modified to enhance or increase immune effector functions. Table 8 (IgG1 Fc Modifications that Enhance Immune Effector Functions) in Section F.4.d.i.c) (Enhancement of or Reduction/Elimination of Fc Immune Effector Functions) summarizes Fc modifications that increase binding to FcγRs or C1q, and thus, enhance immune effector functions, including ADCC, ADCP and CDC, and provides the corresponding modifications by Kabat numbering and by sequential numbering, with reference to the sequence of the IgG1 heavy chain constant domain set forth in SEQ ID NO:9. Any one or more of these modifications, alone or in various combinations, can be introduced into the IgG1 Fc portions of the growth factor trap constructs provided herein. Other modifications, known in the art to confer enhanced or increased immune effector functions, also are contemplated for use herein. These listing in the section above describing IgG1 Fc Modifications that Enhance Immune Effector Functions.

[1099] In alternative embodiments, the Fc portions of the growth factor trap constructs provided herein are modified to decrease or eliminate immune effector functions. This can be achieved, for example, by modifications that decrease or abrogate binding to C1q (for CDC) and/or certain, activating FcγRs (e.g., FcγRI, FcγRIIa, FcγRIIc, FcγRIIIa and FcγRIIIb). This is desirable, for example, where antagonism, but not killing of the cells bearing a target antigen is desired, or where the reduction of undesired or detrimental immune effector functions, such as unwanted pro-inflammatory cytokine release and off-target cytotoxicity, is necessary. Thus, in embodiments where the growth factor trap constructs provided herein are used for the treatment of chronic inflammatory and autoimmune diseases and disorders, such as RA, the Fc portions of the constructs can be modified to reduce or eliminate immune effector functions.

[1100] Table 9 (IgG1 Fc Modifications that Reduce or Eliminate Immune Effector Functions) in Section F.4.d.i.c) (Enhancement of or Reduction/Elimination of Fc Immune Effector Functions) summarizes exemplary IgG1 Fc modifications that reduce or eliminate binding to activating FcγRs and/or C1q, and thus, reduce or eliminate immune effector functions, including ADCC, ADCP and CDC, and can be introduced into the Fc regions of the growth factor trap constructs herein. The table provides the corresponding modifications by Kabat numbering and by sequential numbering, with reference to the sequence of the IgG1 heavy chain constant domain set forth in SEQ ID NO:9. Any one or more of these modifications, alone or in various combinations, can be introduced into the IgG1 Fc portions of the growth factor trap constructs provided herein. Other modifications, known in the art to reduce or eliminate immune effector functions, also are contemplated for use herein.

[1101] The Fc portions of the growth factor trap constructs provided herein also can be modified to increase binding to inhibitory FcγRs, which results in the suppression of the immune response. Therapeutic antibodies with immunosuppressive Fc modifications are advantageous for the treatment of inflammatory diseases. These mutations can be incorporated into the Fc portions of the growth factor trap constructs herein that are intended for the treatment of diseases and conditions with an inflammatory component or etiology or involvement, such as, for example, RA, and other inflammatory and autoimmune diseases.

[1102] Modifications that increase binding to, or that confer selective binding to, inhibitory FcγRIIb, and/or FcγRI but not FcγRIIIa, can be engineered into the IgG1 Fc regions in the growth factor trap constructs provided herein. These modifications include, but are not limited to, one or more of S267E, N297A, L328F, L351S, T366R, L368H, P395K, S267E/L328F, L351S/T366R/L368H/P395K, and combinations thereof, by EU numbering. Table 11 (IgG1 Fc Modifications that Increase Binding to Inhibitory FcγRIIb) in Section F.4.d.i.i shows the corresponding replacements by Kabat numbering, and by sequential numbering, with reference to the sequence of the IgG1 heavy chain constant domain, set forth in SEQ ID NO:9. These modifications were summarized in the section above describing IgG1 Fc Modifications that Increase Binding to Inhibitory FcγRIIb.

[1103] 4. Compositions, Therapeutic Uses and Methods of Treatment

[1104] Provided are nucleic acid molecules encoding the chimeric fusion polypeptides (i.e., ECD/Fc) and growth factor trap constructs, vectors containing the nucleic acid molecules. Also provided are cells containing a vector as described herein, and pharmaceutical compositions containing any of the growth factor trap constructs, encoding nucleic acid molecules, vectors or cells, described herein. The growth factor trap constructs herein are produced and purified as described previously, for example, in Sarup et al. (2008) Mol. Cancer Ther. 7(10):3223-3236; Gompels et al. (2011) Arthritis Research & Therapy 13:R161; Jin et al. (2009) Mol. Med. 15(1-2):11-20; and U.S. Patent Publication No. 2010/0055093.

[1105] A multi-specific, including bi-specific, growth factor trap construct herein contains two or more, particularly two, chimeric proteins created by linking two or more, particularly two, of the same or different ECD polypeptides directly or indirectly to a multimerization domain. In some examples, where the multimerization domain is a polypeptide, such as an immunoglobulin Fc, a gene fusion encoding the ECD-multimerization domain chimeric polypeptide is inserted into an appropriate expression vector. The resulting ECD-multimerization domain chimeric proteins can be expressed in host cells, particularly mammalian cells (e.g., HEK293T or CHO cells, or any other suitable mammalian cells described herein or known in the art), that are transformed with the recombinant expression vector(s), and allowed to assemble into multimers, such as dimers, where the multimerization domains interact to form multivalent polypeptides. The resulting chimeric polypeptides, and multimers formed therefrom, can be purified by any suitable method known in the art, such as, for example, by affinity chromatography over Protein A or Protein G columns. Additionally or alternatively, other techniques for protein purification can be used, including, for example, gel electrophoresis, dialysis, ion-exchange chromatography, ethanol precipitation, HPLC, such as reverse phase HPLC, chromatography on silica, chromatography on heparin Sepharose, chromatofocusing, SDS-PAGE, and ammonium sulfate precipitation. Where two nucleic acid molecules encoding different ECD chimeric polypeptides are transformed into cells (e.g., HER1/Fc and HER3/Fc), the formation of homodimers and heterodimers will occur. Conditions for expression can be adjusted, such that heterodimer formation is favored over homodimer formation. For example, the ratios of the nucleic acid molecules encoding the different ECD chimeric polypeptides can be adjusted, such that an excess of one nucleic acid molecule results in the formation of less homodimers. Additionally, as described above, the introduction of knobs-in-holes into the Fc monomers favors the formation of heterodimers over homodimers.

[1106] ECD chimeric polypeptides containing Fc regions also can be engineered to include a tag with metal chelates or other epitope, such as, for example, a 6×His tag, a c-myc tag, a FLAG tag, maltose binding protein (MBP), glutathione-S-transferase (GST), or thioredoxin (TRX). The tagged domain can be used for rapid purification by metal-chelate chromatography, and/or by antibodies, and to allow for detection in Western blots, immunoprecipitation, or activity depletion/blocking in bioassays.

[1107] a. Pharmaceutical Compositions

[1108] Provided herein are pharmaceutical compositions containing a multi-specific, such as a bi-specific, growth factor trap construct provided herein, or encoding nucleic acid molecule(s). Also provided are pharmaceutical compositions containing an isolated cell that contains a nucleic acid molecule or a vector provided herein. Such compositions contain a therapeutically effective amount of the growth factor trap construct. The pharmaceutical compositions can be formulated in any conventional manner, by mixing a selected amount of the growth factor trap construct, or nucleic acid molecule, with one or more physiologically acceptable carriers or excipients. The pharmaceutical composition can be used for therapeutic, prophylactic, and/or diagnostic applications. The concentration of active compound in the composition will depend on the absorption, inactivation, and excretion rates of the active compound, the dosage schedule, and the amount administered, as well as other factors known to those of skill in the art.

[1109] Pharmaceutical carriers or vehicles suitable for administration of the compounds provided herein include any such carriers known to those skilled in the art to be suitable for the particular mode of administration. Selection of the carrier or excipient is within the skill of the administering professional, and can depend upon a number of parameters. These include, for example, the mode of administration (i.e., systemic, oral, nasal, pulmonary, local, topical, or any other mode), and the disorder treated. Pharmaceutical compositions that include a therapeutically effective amount of a multi-specific, such as a bi-specific, growth factor trap construct, or nucleic acid molecule described herein, also can be provided as a lyophilized powder that is reconstituted, such as with sterile water, immediately prior to administration.

[1110] The pharmaceutical compositions provided herein can be in various forms, e.g., in solid, semi-solid, liquid, powder, aqueous, or lyophilized form. The pharmaceutical compositions provided herein can be formulated for single dosage (direct) administration, or for dilution, or other modification. The concentrations of the compounds in the formulations are effective for delivery of an amount, upon administration, that is effective for the intended treatment. Typically, the compositions are formulated for single dosage administration. The compound can be suspended in micronized or other suitable form, or can be derivatized to produce a more soluble active product. The form of the resulting mixture depends upon a number of factors, including the intended mode of administration, and the solubility of the compound in the selected carrier or vehicle. The effective concentration is sufficient for ameliorating the targeted condition and can be empirically determined. To formulate a composition, the weight fraction of compound is dissolved, suspended, dispersed, or otherwise mixed in a selected vehicle, at an effective concentration, such that the targeted condition is relieved or ameliorated.

[1111] Methods for the production of nucleic acids encoding the growth factor trap constructs provided herein include the methods described in Section H. Section H also describes vectors and cells that can be used, as well as methods for protein expression and purification. The compositions, formulations, dosages and administration methods described in Section I can be adapted for the production of compositions and formulations including the growth factor trap constructs and encoding nucleic acid molecules described herein. The dosages and administration methods can be determined by the administering professional, and are known in the art and described elsewhere herein.

[1112] b. Therapeutic Uses and Methods of Treatment

[1113] The multi-specific, including bi-specific, growth factor trap constructs provided herein can be used for any purpose known to the skilled artisan for use of such molecules. For example, the growth factor trap constructs provided herein can be used for one or more of therapeutic, diagnostic, industrial and/or research purpose(s). In particular, the multi-specific growth factor trap constructs provided herein can be used in the treatment of a variety of diseases and conditions involving CSRs, including RTKs, and, in particular, the HER family of proteins, including those described herein. HER signaling is involved in the etiology of a variety of diseases and disorders, and any such disease or disorder thereof is contemplated for treatment by a growth factor trap construct provided herein.

[1114] The growth factor trap constructs and the encoding nucleic acid molecules, as well as the pharmaceutical compositions, provided herein, can be used for the treatment of any condition for which anti-HER therapies (e.g., trastuzumab, cetuximab, gefitinib, erlotinib, and lapatinib, and others described herein and/or known in the art), are employed, including, but not limited to, cancer and other proliferative diseases and disorders, angiogenesis-related diseases and disorders, rheumatoid arthritis and other chronic inflammatory and autoimmune diseases and disorders, as well as neurodegenerative diseases and disorders of the central nervous system (CNS). For example, treatments using the growth factor trap constructs provided herein, include, but are not limited to, treatment of angiogenesis-related diseases and conditions, inflammatory diseases and conditions, autoimmune diseases and conditions, neurodegenerative diseases, and conditions associated with cell proliferation. Such diseases and conditions include, for example, ocular diseases, atherosclerosis, vascular injuries, Alzheimer's disease, cancers, smooth muscle cell-associated conditions, rheumatoid arthritis (RA), and various autoimmune diseases.

[1115] Dosage levels and regimens can be determined based upon known dosages and regimens, and, if necessary can be extrapolated based upon the changes in properties of the polypeptides and constructs provided herein, and/or can be determined empirically based on a variety of factors. Such factors include, for example, the body weight of the individual, as well as their general health, age, sex, and diet, and the activity of the specific compound employed, the time of administration, the rate of excretion, drug combinations, the severity and course of the disease, and the patient's disposition to the disease and the judgment of the treating physician. The active ingredient typically is combined with a pharmaceutically effective carrier. The amount of active ingredient that can be combined with the carrier materials to produce a single dosage form or multi-dosage form can vary depending upon the host treated and the particular mode of administration.

[1116] Dosage depends upon the particular disorder, disease or condition that is treated, as well as the particular subject. Typical doses are similar to those of known anti-HER therapies, such as antibodies, including trastuzumab, cetuximab, pertuzumab, and panitumumab, and small molecule tyrosine kinase inhibitors, such gefitinib, erlotinib, and lapatinib. Exemplary doses, for a subject, including humans and other animals, range from about or 0.1 to 100 mg/kg, such as 1 mg/kg to about or 30 mg/kg, such as 5 mg/kg to 25 mg/kg. Dose can be determined based on the assumption that an average human has a mass of about 75 kg. Doses can be adjusted for children, infants, and smaller adults.

[1117] Upon improvement of a patient's condition, a maintenance dose of a compound or composition can be administered, if necessary; and the dosage, the dosage form, or frequency of administration, or a combination thereof, can be modified. In some cases, a subject can require intermittent treatment on a long-term basis upon any recurrence of disease symptoms, or based upon scheduled dosages.

[1118] Treatment of diseases and conditions with the multi-specific growth factor trap constructs provided herein can be effected by any suitable route of administration, using suitable formulations as described herein, including, but not limited to, infusion, subcutaneous injection, and inhalation, or intramuscular, intradermal, oral, topical and transdermal administration.

[1119] Provided herein is a method of treatment of a HER-mediated or HER-associated disease or condition, including testing a subject with the disease to identify which HER receptors are expressed or overexpressed, and, based on the results, selecting a multi-specific growth factor trap construct that targets at least one, typically two, of the HER receptors. In one embodiment, the disease is a cancer. Exemplary of cancers for treatment herein include gliomas, as well as pancreatic, gastric, head and neck, cervical, lung, colorectal, endometrial, prostate, esophageal, ovarian, uterine, bladder or breast cancers. Cancers treatable with the growth factor (HER ligand) trap constructs herein are generally cancers expressing at least one HER receptor, typically more than one HER receptor. Such cancers can be identified by any means known in the art for detecting HER expression. For example, HER2 expression can be assessed using a commercially available diagnostic/prognostic assay, such as HercepTest™ (Dako). Paraffin embedded tissue sections from a tumor biopsy are subjected to the immunohistochemistry (IHC) assay and accorded a HER2 protein staining intensity criteria. Tumors accorded with less than a threshold score are characterized as not overexpressing HER2, whereas those tumors with greater than, or equal to, a threshold score, are characterized as overexpressing HER2. In one example of treatment, HER2-overexpressing tumors are assessed as candidates for treatment with a multi-specific growth factor trap construct, such as any provided herein.

[1120] In another embodiment, the HER-mediated or HER-associated disease or condition is an inflammatory or autoimmune disorder, particularly rheumatoid arthritis. An animal model of arthritis, such as the collagen-induced arthritis (CIA) mouse model, can be used to test the growth factor trap constructs provided herein. For example, mice treated with a growth factor trap construct herein, such as by local injection of protein, can be observed for reduction of arthritic symptoms, including paw swelling, erythema and ankylosis. Reduction in synovial angiogenesis and synovial inflammation also can be observed.

[1121] The multi-specific, including bi-specific, growth factor trap constructs, encoding nucleic acid molecules and pharmaceutical compositions provided herein, can be used in the treatment of HER (ErbB)-related diseases or HER receptor-mediated diseases, which are any diseases, conditions or disorders in which a HER receptor and/or ligand is implicated in some aspect of the etiology, pathology or development thereof. HER-related diseases for treatment include cancers, such as, for example, glioma, or pancreatic, gastric, head and neck, cervical, lung, colorectal, endometrial, prostate, esophageal, ovarian, uterine, bladder, renal, or breast cancers. Other diseases that can be treated include non-cancer proliferative diseases, such as, for example, those that involve proliferation and/or migration of smooth muscle cells, inflammatory or autoimmune diseases, skin disorders, and ophthalmic disorders. Diseases and conditions for treatment include, for example, rheumatoid arthritis, a diabetic retinopathy, a disease of the anterior eye, psoriasis, restenosis, stenosis, atherosclerosis, hypertension from thickening of blood vessels, muscle thickening of the bladder, heart or other muscles, bladder diseases, endometriosis, and obstructive airway diseases, as well as diseases or conditions associated with (e.g., caused by, or aggravated by) exposure to one or more neuregulin (NRG) ligands, such as NRG1 (including type I, II, and III), NRG2, NRG3, and/or NRG4, or other HER family ligands. Examples of NRG-associated diseases, and diseases associated with other HER family ligands, include neurological or neuromuscular diseases, including schizophrenia, Parkinson's disease and Alzheimer's disease, cardiomyopathy, pre-eclampsia, nervous system disease, and heart failure.

[1122] Examples of cancers that can be treated include, but are not limited to, carcinoma, lymphoma, blastoma, sarcoma, and leukemia or lymphoid malignancies, such as, for example, squamous cell cancer (e.g., epithelial squamous cell cancer), lung cancer (including small-cell lung cancer, non-small cell lung cancer, adenocarcinoma of the lung and squamous carcinoma of the lung), cancer of the peritoneum, hepatocellular cancer, gastric cancer (including gastrointestinal cancer), pancreatic cancer, glioblastoma, cervical cancer, ovarian cancer, liver cancer, bladder cancer, hepatoma, breast cancer, colon cancer, rectal cancer, renal cell cancer, esophageal cancer, glioma, colorectal cancer, endometrial cancer, uterine cancer, salivary gland carcinoma, renal cancer, prostate cancer, thyroid cancer, hepatic carcinoma, as well as head and neck cancer.

[1123] The multi-specific growth factor trap constructs provided herein, when administered, generally can result in increased therapeutic efficacy and reduced drug resistance, compared to single-targeted anti-HER therapies, such as trastuzumab, cetuximab, and other antibodies described herein or known in the art, as well as small molecule tyrosine kinase inhibitors, such as gefitinib, erlotinib and lapatinib. As described herein, resistance to single-targeted anti-HER therapies is associated with the co-expression and/or upregulation of other HER family members and the overexpression of their ligands. The HER-ligand binding constructs provided herein, which behave as receptor decoys and sequester multiple HER family ligands, prevent ligand-dependent receptor activation and downregulate aberrant HER family activity, resulting in the inhibition of multiple ligand-induced HER family members simultaneously. This increases therapeutic efficacy and decreases the chances for development of drug resistance.

[1124] 5. Combination Therapies

[1125] Combination therapies can be used. Combination therapies include administration of the multi-specific, including bi-specific, growth factor trap constructs, nucleic acid molecules and pharmaceutical compositions provided herein, in combination with another agent or treatment, including radiation and surgery. The further agent or therapy can be administered concurrently with, before, after, or intermittently with, the treatments provided herein. They can be in separate compositions or in co-formulations.

[1126] The multi-specific, such as bi-specific, heteromultimeric growth factor trap constructs, nucleic acid molecules and pharmaceutical compositions provided herein can be administered before, after, intermittently with, or concomitantly with, one or more other therapeutic regimens or agents, including, but not limited to, TNF antagonists/blockers, chemotherapeutic agents, single-targeted anti-HER therapies (including antibodies and tyrosine kinase inhibitors), anti-angiogenic agents, antibodies, cytotoxic agents, anti-inflammatory agents, cytokines, growth inhibitory agents, anti-hormonal agents, cardioprotectants, steroids, immunostimulatory agents, immunosuppressive agents, biologic or non-biologic disease-modifying anti-rheumatic drugs (DMARDs), treatments (including antibodies) for infectious diseases, or other therapeutic agents. In particular, the growth factor trap constructs are administered with the TNFR1/TNFR2 axis constructs provided herein. They also can be administered with other anti-TNF therapies, including any described in the sections above or known to those of skill in the art.

[1127] The TNFR1 antagonist constructs, TNFR2 agonist constructs, the multi-specific constructs, nucleic acids, and other constructs provided herein can be administered in regimens with other anti-TNF therapies. Exemplary of anti-TNF therapies that can be used in combination therapies herein include, for example, conventional synthetic DMARDs, such as, for example, methotrexate (MTX), hydroxychloroquine (HCQ; Plaquenil®), sulfasalazine (Azulfidine®), and leflunomide (Arava®); biologic DMARDs, such as, for example, abatacept (Orencia®), anakinra (Kineret®), rituximab (Rituxan®, Truxima®, MabThera®), tocilizumab (atlizumab, Actemra®, RoActemra®), corticosteroids (e.g., dexamethasone, methylprednisolone, prednisolone, prednisone, or triamcinolone), tofacitinib (Xeljanz®), and TNF-inhibitors/anti-TNF agents, such as, for example, certolizumab pegol (Cimzia®), infliximab (Remicade®), adalimumab (Humira®), golimumab (Simponi®), and etanercept (Enbrel®). The combination therapy also can include immunotherapeutic drugs, such as, for example, cyclosporine, methotrexate, adriamycin or cisplatinum, and immunotoxins.

[1128] In particular examples, the growth factor trap constructs provided herein are administered with any of the TNFR1 antagonist constructs, TNFR2 agonist constructs, or multi-specific, such as bi-specific, TNFR1 antagonist/TNFR2 agonist constructs, provided herein, for the treatment of any of the chronic inflammatory, autoimmune, and/or neurodegenerative/demyelinating diseases and conditions described herein, particularly rheumatoid arthritis (RA).

[1129] In some examples, the growth factor trap constructs provided herein are administered with one or more anti-angiogenic agents. For example, the anti-angiogenic factor can be a small molecule or a protein (e.g., an antibody, Fc fusion, or cytokine) that binds to a growth factor or growth factor receptor involved in promoting angiogenesis. Examples of anti-angiogenic agents include, but are not limited to antibodies that bind to Vascular Endothelial Growth Factor (VEGF) or that bind to VEGF-R, RNA-based therapeutics that reduce levels of VEGF or VEGF-R expression, VEGF-toxin fusions, Regeneron's VEGF-trap, angiostatin (plasminogen fragment), antithrombin III, angiozyme, ABT-627, Bay 12-9566, BeneFin, bevacizumab, bisphosphonates, BMS-275291, cartilage-derived inhibitor (CDI), CAI, CD59 complement fragment, CEP-7055, Col 3, Combretastatin A-4, endostatin (collagen XVIII fragment), farnesyl transferase inhibitors, fibronectin fragment, GRO-beta, halofuginone, heparinases, heparin hexasaccharide fragment, HMV833, human chorionic gonadotropin (hCG), IM-862, interferon alpha, interferon beta, interferon gamma, interferon inducible protein 10 (IP-10), interleukin-12, kringle 5 (plasminogen fragment), marimastat, metalloproteinase inhibitors (e.g., TIMPs), 2-methoxyestradiol, MMI 270 (CGS 27023A), plasminogen activator inhibitor (PAI), platelet factor-4 (PF4), prinomastat, prolactin 16 kDa fragment, proliferin-related protein (PRP), PTK 787/ZK 222594, retinoids, solimastat, squalamine, SS3304, SU5416, SU6668, SU11248, tetrahydrocortisol-S, tetrathiomolybdate, thalidomide, thrombospondin-1 (TSP-1), TNP470, transforming growth factor beta (TGF-β), vasculostatin, vasostatin (calreticulin fragment), ZS6126, and ZD6474.

[1130] In some examples, a growth factor trap construct provided herein is administered with one or more tyrosine kinase inhibitors, and optionally the TNFR1/TNFR2 axis constructs provided herein. Examples of tyrosine kinase inhibitors include, but are not limited, to quinazolines, such as PD 153035, 4-(3-chloroanilino)quinazoline; pyridopyrimidines; pyrimidopyrimidines; pyrrolopyrimidines, such as CGP 59326, CGP 60261 and CGP 62706; pyrazolopyrimidines; 4-(phenylamino)-7H-pyrrolo(2,3-d) pyrimidines; curcumin (diferuloylmethane, 4,5-bis(4-fluoroanilino)phthalimide); tyrphostins containing nitrothiophene moieties; PD-0183805 (Warner-Lambert); antisense molecules (e.g., those that bind to ErbB-encoding nucleic acids); quinoxalines (see, e.g., U.S. Pat. No. 5,804,396); tyrphostins (see, e.g., U.S. Pat. No. 5,804,396); ZD6474 (Astra Zeneca); PTK-787 (Novartis/Schering A G); pan-ErbB inhibitors, such as C1-1033 (Pfizer); Affinitac (ISIS 3521; Isis/Lilly); Imatinib mesylate (STI571, Gleevec®; Novartis); PKI 166 (Novartis); GW2016 (Glaxo SmithKline); C1-1033 (Pfizer); EKB-569 (Wyeth); Semaxinib (Sugen); ZD6474 (AstraZeneca); PTK-787 (Novartis/Schering A G); INC-1 C11 (ImClone); gefitinib (Iressa®, ZD1839, AstraZeneca); and OSI-774 (sold under the trademark Tarceva®, OSI Pharmaceuticals/Genentech), or any as described in any of the following patent publications: U.S. Pat. No. 5,804,396, and International Application Publication Nos. WO 99/09016, WO 98/43960, WO 97/38983, WO 99/06378, WO 99/06396, WO 96/30347, WO 96/33978, WO 96/33979, and WO 96/33980.

[1131] Other compounds useful in combination therapies include steroids, such as the angiostatic 4,9(11)-steroids and C21-oxygenated steroids, angiostatin, endostatin, vasculostatin, canstatin and maspin, angiopoietins, bacterial polysaccharide CM101 and the antibody LM609 (see, e.g., U.S. Pat. No. 5,753,230), thrombospondin (TSP-1), platelet factor 4 (PF4), interferons, metalloproteinase inhibitors, pharmacological agents, including AGM-1470/TNP-470, thalidomide, and carboxyamidotriazole (CAI), cortisone, such as in the presence of heparin or heparin fragments, anti-Invasive Factor, retinoic acids and paclitaxel, shark cartilage extract, anionic polyamide or polyurea oligomers, oxindole derivatives, estradiol derivatives and thiazolopyrimidine derivatives.

[1132] Examples of anti-cancer antibodies that can be co-administered with a growth factor trap construct provided herein include, but are not limited to, anti-17-IA cell surface antigen antibodies, such as edrecolomab (sold under the trademark (Panorex®)); anti-4-1BB antibodies; anti-4Dc antibodies; anti-A33 antibodies, such as A33 and CDP-833; anti-al integrin antibodies, such as natalizumab; anti-α4β7 integrin antibodies, such as LDP-02; anti-αVβ1 integrin antibodies, such as F-200, M-200, and SJ-749; anti-αVβ3 integrin antibodies, such as abciximab, CNTO-95, Mab-17E6, and Medi-523 (sold under the tradename Vitaxin); anti-complement factor 5 (C5) antibodies, such as 5G1.1; anti-CA125 antibodies, such as oregovomab (sold under the trademark OvaRex®); anti-CD3 antibodies, such as vsilizumab (Nuvion®), and Rexomab; anti-CD4 antibodies, such as IDEC-151, MDX-CD4, and OKT4A; anti-CD6 antibodies, such as Oncolysin B and Oncolysin CD6; anti-CD7 antibodies, such as HB2; anti-CD19 antibodies, such as B43, MT-103, and Oncolysin B; anti-CD20 antibodies, such as 2H7, 2H7.v16, 2H7.v114, 2H7.v115, Tositumomab (Bexxar®), rituximab (Rituxan®), and Ibritumomab tiuxetan (Zevalin®); anti-CD22 antibodies, such as epratuzumab (Lymphocide®); anti-CD23 antibodies, such as IDEC-152; anti-CD25 antibodies, such as basiliximab and Zenapax® (daclizumab); anti-CD30 antibodies, such as AC10, MDX-060, and SGN-30; anti-CD33 antibodies, such as gemtuzumab ozogamicine (Mylotarg®), Oncolysin M, and Smart Ml 95; anti-CD38 antibodies; anti-CD40 antibodies, such as SGN-40 and toralizumab; anti-CD40L antibodies, such as 5c8, Ruplizumab (Antova), and IDEC-131; anti-CD44 antibodies, such as bivatuzumab; anti-CD46 antibodies; anti-CD52 antibodies, such as Campath® (alemtuzumab); anti-CD55 antibodies, such as SC-1; anti-CD56 antibodies, such as huN901-DM1; anti-CD64 antibodies, such as MDX-33; anti-CD66e antibodies, such as XR-303; anti-CD74 antibodies, such as IMMU-110; anti-CD80 antibodies, such as galiximab and IDEC-114; anti-CD89 antibodies, such as MDX-214; anti-CD123 antibodies; anti-CD138 antibodies, such as B-B4-DM1; anti-CD146 antibodies, such as AA-98; anti-CD148 antibodies; anti-CEA antibodies, such as cT84.66, labetuzumab, and Pentacea®; anti-CTLA-4 antibodies, such as MDX-101; anti-CXCR4 antibodies; anti-EGFR antibodies, such as ABX-EGF, Erbitux® (cetuximab), panitumumab, IMC-C225, and Merck Mab 425; anti-EpCAM antibodies, such as Crucell's anti-EpCAM, ING-1, and IS-IL-2; anti-ephrin B2/EphB4 antibodies; anti-HER2 antibodies, such as Herceptin® (trastuzumab), pertuzumab, and MDX-210; anti-FAP (fibroblast activation protein) antibodies, such as sibrotuzumab; anti-ferritin antibodies, such as NXT-211; anti-FGF-1 antibodies; anti-FGF-3 antibodies; anti-FGF-8 antibodies; anti-FGFR antibodies; anti-fibrin antibodies; anti-G250 antibodies, such as WX-G250 and Girentuximab (Rencarex®); anti-GD2 ganglioside antibodies, such as EMD-273063 and TriGem; anti-GD3 ganglioside antibodies, such as BEC2, KW-2871, and mitumomab; anti-gpIIb/IIIa antibodies, such as ReoPro; anti-heparinase antibodies; anti-HLA antibodies, such as Oncolym, and Smart 1D10; anti-HM1.24 antibodies; anti-ICAM antibodies, such as ICM3; anti-IgA receptor antibodies; anti-IGF-1 antibodies, such as CP-751871 and EM-164; anti-IGF-1R antibodies, such as IMC-A12; anti-IL-6 antibodies, such as CNTO-328 and elsilimomab; anti-IL-15 antibodies, such as HuMax®-IL15 antibody; anti-KDR antibodies; anti-laminin 5 antibodies; anti-Lewis Y antigen antibodies, such as Hu3S193 and IGN-311; anti-MCAM antibodies; anti-Muc antibodies, such as BravaRex and TriAb; anti-NCAM antibodies, such as ERIC-1 and ICRT; anti-PEM antigen antibodies, such as Theragyn and Therex; anti-PSA antibodies; anti-PSCA antibodies, such as IG8; anti-Ptk antibodies; anti-PTN antibodies; anti-RANKL antibodies, such as AMG-162; anti-RLIP76 antibodies; anti-SK-1 antigen antibodies, such as Monopharm C; anti-STEAP antibodies; anti-TAG72 antibodies, such as CC49-SCA and MDX-220; anti-TGF-β antibodies, such as CAT-152; anti-TNF-α antibodies, such as CDP571, CDP870, D2E7, adalimumab (Humira®), and infliximab (Remicade®); anti-TRAIL-R1 and TRAIL-R2 antibodies; anti-VE-cadherin-2 antibodies; and anti-VLA-4 antibodies, such as Antegren® antibody. Anti-idiotype antibodies, including but not limited to, the GD3 epitope antibody BEC2, and the gp72 epitope antibody 105AD7, can be used. Bispecific antibodies, including, but not limited to, the anti-CD3/CD20 antibody Bi20, also can be used.

[1133] Examples of antibodies that can treat autoimmune or inflammatory diseases, transplant rejection, and/or GvHD, that can be co-administered with a growth factor trap construct provided herein, include, but are not limited to, anti-α4β7 integrin antibodies, such as LDP-02; anti-beta2 integrin antibodies, such as LDP-01; anti-complement (C5) antibodies, such as 5G1.1; anti-CD2 antibodies, such as BTI-322, and MEDI-507; anti-CD3 antibodies, such as OKT3, and SMART anti-CD3; anti-CD4 antibodies, such as IDEC-151, MDX-CD4, and OKT4A; anti-CD11a antibodies; anti-CD14 antibodies, such as IC14; anti-CD18 antibodies; anti-CD23 antibodies, such as IDEC-152; anti-CD25 antibodies, such as Zenapax; anti-CD40L antibodies, such as 5c8, Antova, and IDEC-131; anti-CD64 antibodies, such as MDX-33; anti-CD80 antibodies, such as IDEC-114; anti-CD147 antibodies, such as ABX-CBL; anti-E-selectin antibodies, such as CDP850; anti-gpIIb/IIIa antibodies, such as ReoPro®/Abcixima; anti-ICAM-3 antibodies, such as ICM3; anti-ICE antibodies, such as VX-740; anti-FcγR1 antibodies, such as MDX-33; anti-IgE antibodies, such as rhuMAb-E25; anti-IL-4 antibodies, such as SB-240683; anti-IL-5 antibodies, such as SB-240563, and SCH55700; anti-IL-8 antibodies, such as ABX-IL8; anti-interferon gamma antibodies; anti-TNFα antibodies, such as CDP571, CDP870, D2E7, adalimumab, infliximab, and MAK-195F; and anti-VLA-4 antibodies, such as Antegren. Examples of other Fc-containing molecules that can be co-administered to treat autoimmune or inflammatory diseases, transplant rejection and GvHD include, but are not limited to, the TNFRII receptor/Fc fusion Enbrel® (etanercept), and Regeneron's IL-1 trap.

[1134] Examples of antibodies that can be co-administered to treat infectious diseases include, but are not limited to, anti-anthrax antibodies, such as ABthrax; anti-CMV antibodies, such as CytoGam and sevirumab; anti-cryptosporidium antibodies, such as CryptoGAM, and Sporidin-G; anti-helicobacter antibodies, such as Pyloran; anti-hepatitis B antibodies, such as HepeX-B, and Nabi-HB; anti-HIV antibodies, such as HRG-214; anti-RSV antibodies, such as felvizumab, HNK-20, palivizumab, and RespiGam; and anti-staphylococcus antibodies, such as Aurexis, Aurograb, BSYX-A110, and SE-Mab.

[1135] In some examples, a growth factor trap construct described herein is administered with one or more chemotherapeutic agents. Examples of chemotherapeutic agents include, but are not limited to, alkylating agents such as thiotepa and cyclophosphamide (CYTOXAN®); alkyl sulfonates, such as busulfan, improsulfan and piposulfan; androgens, such as calusterone, dromostanolone propionate, epitiostanol, mepitiostane, and testolactone; anti-adrenals, such as aminoglutethimide, mitotane, and trilostane; anti-androgens, such as flutamide, nilutamide, bicalutamide, leuprolide, and goserelin; antibiotics, such as aclacinomycins, actinomycin, anthramycin, azaserine, bleomycins, cactinomycin, calicheamicin, carubicin, carminomycin, carzinophilin, chromomycins, dactinomycin, daunorubicin, detorubicin, 6-diazo-5-oxo-L-norleucine, doxorubicin, epirubicin, esorubicin, idarubicin, marcellomycin, mitomycins, mycophenolic acid, nogalamycin, olivomycins, peplomycin, porfiromycin, puromycin, quelamycin, rodorubicin, streptonigrin, streptozocin, tubercidin, ubenimex, zinostatin, and zorubicin; anti-estrogens, including, for example, tamoxifen, raloxifene, aromatase inhibiting 4(5)-imidazoles, 4-hydroxytamoxifen, trioxifene, keoxifene, LY 117018, onapristone, and toremifene (Fareston); anti-metabolites, such as methotrexate and 5-fluorouracil (5-FU); folic acid analogs, such as denopterin, methotrexate, pteropterin, and trimetrexate; aziridines, such as benzodepa, carboquone, meturedepa, and uredepa; ethylenimines and methylmelamines, including altretamine, triethylenemelamine, triethylenephosphoramide, triethylenethiophosphoramide and trimethylol melamine; folic acid replenishers, such as folinic acid; nitrogen mustards, such as chlorambucil, chlornaphazine, chlorophosphamide, estramustine, ifosfamide, mechlorethamine, mechlorethamine oxide hydrochloride, melphalan, novembichin, phenesterine, prednimustine, trofosfamide, and uracil mustard; nitrosoureas, such as carmustine, chlorozotocin, fotemustine, lomustine, nimustine, and ranimustine; platinum analogs, such as cisplatin and carboplatin; vinblastine; platinum; proteins, such as arginine deiminase and asparaginase; purine analogs, such as fludarabine, 6-mercaptopurine, thiamiprine, and thioguanine; pyrimidine analogs, such as ancitabine, azacitidine, 6-azauridine, carmofur, cytarabine, dideoxyuridine, doxifluridine, enocitabine, floxuridine, and 5-FU; taxanes, such as paclitaxel (TAXOL®, Bristol-Myers Squibb Oncology, Princeton, N.J.) and docetaxel (TAXOTERE®, Rhone-Poulenc Rorer, Antony, France); topoisomerase inhibitors, such as RFS 2000; thymidylate synthase inhibitors, such as Tomudex; additional chemotherapeutics, including aceglatone; aldophosphamide glycoside; aminolevulinic acid; amsacrine; bestrabucil; bisantrene; edatrexate; defosfamide; demecolcine; diaziquone; difluoromethylornithine (DMFO); eflornithine; elliptinium acetate; etoglucid; gallium nitrate; hydroxyurea; lentinan; lonidamine; mitoguazone; mitoxantrone; mopidamol; nitracrine; pentostatin; phenamet; pirarubicin; podophyllinic acid; 2-ethylhydrazide; procarbazine; PSK®; razoxane; sizofiran; spirogermanium; tenuazonic acid; triaziquone; 2,2′,2″-trichlorotriethylamine; urethan; vindesine; dacarbazine; mannomustine; mitobronitol; mitolactol; pipobroman; gacytosine; arabinoside (“Ara-C”); cyclophosphamide; thiotepa; chlorambucil; gemcitabine; 6-thioguanine; mercaptopurine; methotrexate; etoposide (VP-16); ifosfamide; mitomycin C; mitoxantrone; vincristine; vinorelbine; Navelbine; Novantrone; teniposide; daunomycin; aminopterin; Xeloda; ibandronate; CPT-11; retinoic acid; esperamycins; capecitabine; and topoisomerase inhibitors, such as irinotecan. Pharmaceutically acceptable salts, acids or derivatives of any of the above also can be used.

[1136] A chemotherapeutic agent can be administered as a prodrug. Examples of prodrugs that can be administered with a growth factor trap construct described herein include, but are not limited to, phosphate-containing prodrugs, thiophosphate-containing prodrugs, sulfate-containing prodrugs, peptide-containing prodrugs, D-amino acid-modified prodrugs, glycosylated prodrugs, beta-lactam-containing prodrugs, optionally substituted phenoxy acetamide-containing prodrugs or optionally substituted phenylacetamide-containing prodrugs, and 5-fluorocytosine and other 5-fluorouridine prodrugs, which can be converted into the more active cytotoxic free drug.

[1137] In some examples, a multi-specific growth factor trap construct described herein is administered with one or more immunomodulatory agents. Such agents can increase or decrease production of one or more cytokines, up- or down-regulate self-antigen presentation, mask MHC antigens, or promote the proliferation, differentiation, migration, or activation of one or more types of immune cells. Examples of immunomodulatory agents include, but are not limited to, non-steroidal anti-inflammatory drugs (NSAIDs), such as aspirin, ibuprofen, celecoxib, diclofenac, etodolac, fenoprofen, indomethacin, ketorolac, oxaprozin, nabumetone, sulindac, tolmetin, rofecoxib, naproxen, ketoprofen, and nabumetone; steroids, such as glucocorticoids, dexamethasone, cortisone, hydroxycortisone, methylprednisolone, prednisone, prednisolone and triamcinolone; eicosanoids, such as prostaglandins, thromboxanes, and leukotrienes; topical steroids, such as anthralin, calcipotriene, clobetasol, and tazarotene; cytokines, such as TGFβ, IFNα, IFNβ, IFNγ, IL-2, IL-4, IL-10; cytokines, chemokines, or receptor antagonists including antibodies, soluble receptors, and receptor-Fc fusions against BAFF, B7, CCR2, CCR5, CD2, CD3, CD4, CD6, CD7, CD8, CD11, CD14, CD15, CD17, CD18, CD20, CD23, CD28, CD40, CD40L, CD44, CD45, CD52, CD64, CD80, CD86, CD147, CD152, complement factors (C5, D) CTLA-4, eotaxin, Fas, ICAM, ICOS, IFNα, IFNβ, IFNγ, IFNAR, IgE, IL-1, IL-2, IL-2R, IL-4, IL-5R, IL-6, IL-8, IL-9 IL-12, IL-13, IL-13R1, IL-15, IL-18R, IL-23, integrins, LFA-1, LFA-3, MHC, selectins, TGFβ, TNFα, TNFβ, TNFR1, TNFR2, and T-cell receptors, including etanercept (Enbrel®), adalimumab (Humira®), and infliximab (Remicade®); heterologous anti-lymphocyte globulin; and other immunomodulatory molecules, such as 2-amino-6-aryl-5 substituted pyrimidines, anti-idiotypic antibodies for MHC binding peptides and MHC fragments, azathioprine, brequinar, Bromocryptine, cyclophosphamide, cyclosporine A, D-penicillamine, deoxyspergualin, FK506, glutaraldehyde, gold, hydroxychloroquine, leflunomide, malononitriloamides (e.g., leflunomide), methotrexate, minocycline, mizoribine, mycophenolate mofetil, rapamycin, and sulfasalazine.

[1138] In some examples, a multi-specific growth factor trap construct described herein is administered with one or more cytokines. Examples of cytokines, include but are not limited to, lymphokines, monokines, and traditional polypeptide hormones. Included among the cytokines are interferons, such as interferon-alpha, -beta, and -gamma; colony stimulating factors (CSFs), such as macrophage-CSF (M-CSF), granulocyte-macrophage-CSF (GM-CSF), and granulocyte-CSF (G-CSF); interleukins (ILs), such as IL-1, IL-1alpha, IL-2, IL-3, IL-4, IL-5, IL-6, IL-7, IL-8, IL-9, IL-10, IL-11, IL-12 and IL-15; a tumor necrosis factor, such as TNF-alpha or TNF-beta; and other polypeptide factors, including LIF and kit ligand (KL).

[1139] In some examples, a multi-specific growth factor trap construct described herein is administered with one or more cytokines or other agents that stimulate cells of the immune system and enhance desired effector function(s). For example, agents that stimulate natural killer (NK) cells, including, but not limited to, IL-2, can be administered with a multi-specific growth factor trap construct described herein. In another embodiment, agents that stimulate macrophages, including, but not limited to, C5a, and formyl peptides, such as N-formyl-methionyl-leucyl-phenylalanine (see, e.g., Beigier-Bompadre et al. (2003) Scand. J. Immunol. 57:221-228), can be administered with a multi-specific growth factor trap construct described herein. Agents that stimulate neutrophils, including, but not limited to, G-CSF and GM-CSF, also can be administered with a multi-specific growth factor trap construct described herein. Agents that promote migration of such immunostimulatory cytokines can be administered with a multi-specific growth factor trap construct described herein. Additional agents including, but not limited to, interferon gamma, IL-3 and IL-7, which can promote one or more effector functions. In some examples, a multi-specific growth factor trap construct described herein is administered with one or more cytokines or other agents that inhibit effector cell function.

[1140] In some examples, a multi-specific growth factor trap construct described herein is administered with one or more antibiotics, including, but not limited to: aminoglycoside antibiotics (e.g., apramycin, arbekacin, bambermycins, butirosin, dibekacin, gentamicin, kanamycin, neomycin, netilmicin, paromomycin, ribostamycin, sisomicin, and spectinomycin), aminocyclitols (e.g., spectinomycin), amphenicol antibiotics (e.g., azidamfenicol, chloramphenicol, florfenicol, and thiamphenicol), ansamycin antibiotics (e.g., rifamide and rifampin), carbapenems (e.g., imipenem, meropenem, and panipenem), cephalosporins (e.g., cefaclor, cefadroxil, cefamandole, cefatrizine, cefazedone, cefozopran, cefpimizole, cefpiramide, cefpirome, cefprozil, cefuroxime, cefixime, cephalexin, and cephradine), cephamycins (e.g., cefbuperazone, cefoxitin, cefminox, cefmetazole, and cefotetan), lincosamides (e.g., clindamycin, and lincomycin), macrolide (e.g., azithromycin, brefeldin A, clarithromycin, erythromycin, roxithromycin, and tobramycin), monobactams (e.g., aztreonam, carumonam, and tigemonam), mupirocin, Oxacephems (e.g., flomoxef, latamoxef, and moxalactam), penicillins (e.g., amdinocillin, amdinocillin pivoxil, amoxicillin, bacampicillin, benzylpenicillinic acid, benzylpenicillin sodium, epicillin, fenbenicillin, floxacillin, penamecillin, penethamate hydriodide, penicillin o-benethamine, penicillin O, penicillin V, penicillin V benzoate, penicillin V hydrabamine, penimepicycline, and phenethicillin potassium), polypeptides (e.g., bacitracin, colistin, polymixin B, teicoplanin, and vancomycin), quinolones (e.g., amifloxacin, cinoxacin, ciprofloxacin, enoxacin, enrofloxacin, fleroxacin, flumequine, gatifloxacin, gemifloxacin, grepafloxacin, lomefloxacin, moxifloxacin, nalidixic acid, norfloxacin, ofloxacin, oxolinic acid, pefloxacin, pipemidic acid, rosoxacin, rufloxacin, sparfloxacin, temafloxacin, tosufloxacin, and trovafloxacin), rifampin, streptogramins (e.g., quinupristin, and dalfopristin), sulfonamides (e.g., sulfanilamide, and sulfamethoxazole), and tetracyclines (e.g., chlortetracycline, demeclocycline hydrochloride, demethylchlortetracycline, doxycycline, Duramycin, minocycline, neomycin, oxytetracycline, streptomycin, tetracycline, and vancomycin).

[1141] In some examples, a multi-specific growth factor trap construct provided herein is administered with one or more anti-fungal agents, including, but not limited to, amphotericin B, ciclopirox, clotrimazole, econazole, fluconazole, flucytosine, itraconazole, ketoconazole, miconazole, nystatin, terbinafine, terconazole, and tioconazole.

[1142] In some examples, a multi-specific growth factor trap construct described herein is administered with one or more antiviral agents, including, but not limited to, protease inhibitors, reverse transcriptase inhibitors, and others, including type I interferons, viral fusion inhibitors, neuraminidase inhibitors, acyclovir, adefovir, amantadine, amprenavir, clevudine, enfuvirtide, entecavir, foscarnet, ganciclovir, idoxuridine, indinavir, lopinavir, pleconaril, ribavirin, rimantadine, ritonavir, saquinavir, trifluridine, vidarabine, and zidovudine.

[1143] A multi-specific growth factor trap construct provided herein can be combined with other therapeutic regimens. For example, in one embodiment, the patient to be treated with a multi-specific growth factor trap construct provided herein can receive radiation therapy. Radiation therapy can be administered according to protocols commonly employed in the art and known to the skilled artisan. Such therapy includes, but is not limited to, cesium, iridium, iodine, or cobalt radiation. The radiation therapy can be whole body irradiation, or can be directed locally to a specific site or tissue in or on the body, such as the lung, bladder, or prostate. Radiation therapy also can comprise treatment with an isotopically labeled molecule, such as an antibody. Examples of radioimmunotherapeutics include those sold under the trademarks Zevalin® (Y-90 labeled anti-CD20), LymphoCide® (Y-90 labeled anti-CD22), and Bexxar® (I-131 labeled anti-CD20).

[1144] Typically, radiation therapy is administered in pulses over a period of time from about 1 to 2 weeks. The radiation therapy can, however, be administered over longer periods of time. For instance, radiation therapy can be administered to patients having head and neck cancer for about 6 to about 7 weeks. Optionally, the radiation therapy can be administered as a single dose or as multiple, sequential doses. The skilled medical practitioner can determine empirically the appropriate dose or doses of radiation therapy useful herein. In some examples, the multi-specific growth factor trap construct, and optionally, one or more other anti-cancer therapies, are employed to treat cancer cells ex vivo. It is contemplated that such ex vivo treatment can be useful in bone marrow transplantation, and particularly, autologous bone marrow transplantation. For instance, treatment of cells or tissue(s) containing cancer cells with a multi-specific growth factor trap construct and one or more anti-cancer therapies, such as described herein, can be employed to deplete, or substantially deplete, the cancer cells prior to transplantation in a recipient patient.

[1145] In addition, it is contemplated that the multi-specific growth factor trap constructs provided herein can be administered to a patient or subject in combination with other therapeutic techniques, such as surgery or phototherapy.

[1146] For example, provided herein is a method of treating cancer by administering any of the multi-specific growth factor trap constructs, nucleic acid molecules, or pharmaceutical compositions provided herein, in combination with another anti-cancer agent. The anti-cancer agent can include radiation and/or a chemotherapeutic agent. For example, the anti-cancer agent can be a tyrosine kinase inhibitor or an antibody. Exemplary anti-cancer agents include a quinazoline kinase inhibitor, an antisense or siRNA or other double-stranded RNA molecule, an antibody that interacts with a HER family receptor, and an antibody conjugated to a radionuclide, or a cytotoxin. Other exemplary anti-cancer agents include gefitinib, lapatinib, eroltinib, panitumumab, cetuximab, trastuzumab, imatinib, a platinum complex, or a nucleoside analog. Examples of cytotoxic agents or chemotherapeutic agents include, for example, taxanes (such as paclitaxel and docetaxel) and anthracycline antibiotics, doxorubicin/adriamycine, carminomycin, daunorubicin, aminiopterin, methotrexate, methopterin, dichloro-methotrexate, mitomycin C, porfiromycin, 5-fluorouracil, 6-mercaptopurine, cytosine arabinoside, podophyllotoxin, or podophyllotosin derivatives, such as etoposide or etoposide phosphate, melphalan, vinblastine, vincristine, leurosidine, vindesine, leurosidne, maytansinol, epothilone A or B, taxotere, taxol, estramustine, cisplatin, combretastatin and analogs, and cyclophosphamide. Any of the other anti-cancer antibodies and chemotherapeutic agents described elsewhere herein, or known in the art, also are contemplated for use for the treatment of cancer, in combination with the multi-specific growth factor trap constructs, nucleic acid molecules, or pharmaceutical compositions provided herein.

[1147] In another example, provided herein is a method of treating rheumatoid arthritis (RA) by administering any of the multi-specific growth factor trap constructs, nucleic acid molecules, or pharmaceutical compositions provided herein, in combination with another anti-rheumatic drug, such as an anti-TNF therapy. Exemplary of anti-TNF therapies that can be used in combination with a multi-specific growth factor trap construct, nucleic acid molecule, or pharmaceutical composition provided herein, include conventional synthetic DMARDs, such as, for example, methotrexate (MTX), hydroxychloroquine (HCQ; Plaquenil®), sulfasalazine (Azulfidine®), and leflunomide (Arava®); biologic DMARDs, such as, for example, abatacept (Orencia®), anakinra (Kineret®), rituximab (Rituxan®, Truxima®, MabThera®), tocilizumab (atlizumab, Actemra®, RoActemra®), corticosteroids (e.g., dexamethasone, methylprednisolone, prednisolone, prednisone, or triamcinolone), tofacitinib (Xeljanz®), and TNF-inhibitors/anti-TNF agents, such as, for example, certolizumab pegol (Cimzia®), infliximab (Remicade®), adalimumab (Humira®), golimumab (Simponi®), and etanercept (Enbrel®). The combination therapy also can include immunotherapeutic drugs, such as, for example, cyclosporine, methotrexate, adriamycin or cisplatinum, and immunotoxins.

[1148] Also provided herein is a method for the treatment of chronic inflammatory, autoimmune, neurodegenerative and/or demyelinating diseases, described elsewhere herein, particularly RA, by administering any of the multi-specific growth factor trap constructs described herein, with any of the TNFR1 antagonist, TNFR2 agonist, or bi-specific TNFR1 antagonist/TNFR2 agonist constructs provided herein. Optionally, an additional anti-TNF therapy, such as methotrexate, or any described above or elsewhere herein, or known in the art, also can be administered, as can any other therapies that are useful in the treatment of chronic inflammatory, autoimmune, neurodegenerative and/or demyelinating diseases, such as immunosuppressive agents, anti-angiogenesis agents, cardioprotectants, antibodies, cytotoxic agents, anti-inflammatory agents, cytokines, growth inhibitory agents, chemotherapeutic agents, biologic or non-biologic disease-modifying anti-rheumatic drugs (DMARDs), treatments (including antibodies) for infectious diseases, or other suitable therapeutic agents described herein or known in the art.

[1149] Angiogenesis plays a key role in the formation and maintenance of the pannus in RA. The multi-specific growth factor trap constructs provided herein can be used in combination with other treatments to modulate angiogenesis. For example, angiogenesis inhibitors can be used in combination with the multi-specific growth factor trap constructs provided herein to treat RA. Exemplary angiogenesis inhibitors include, but are not limited to, angiostatin, antiangiogenic antithrombin III, canstatin, cartilage derived inhibitor, fibronectin fragment, IL-12, vasculostatin, and others known in the art and described elsewhere herein.

[1150] In some embodiments, the growth factor trap constructs provided herein are used in combination with TNF blockers and/or other DMARDs, such as methotrexate, and compared to standard-of-care RA therapies. For example, the growth factor trap constructs provided herein can be combined with etanercept and/or methotrexate, such as suboptimal doses of etanercept and/or methotrexate. To assess effectiveness, the combination can be therapy with etanercept and/or methotrexate alone, including optimal and suboptimal doses of etanercept and/or methotrexate. The growth factor trap constructs permit lower doses of other treatments, thereby reducing adverse or undesirable side effects. In other embodiments, the growth factor trap constructs provided herein can be combined with other anti-TNF therapies, such as adalimumab or infliximab (including suboptimal doses thereof), with or without methotrexate (including suboptimal doses of methotrexate), and efficacy of treatment is compared to treatment with the anti-TNF therapies with or without methotrexate, alone. In yet another embodiment, the growth factor trap constructs provided herein can be combined with any of the TNFR1 antagonist, TNFR2 agonist, or the multi-specific, such as bi-specific, TNFR1 antagonist/TNFR2 agonist constructs provided herein, and compared to standard-of-care RA therapies, such as etanercept, adalimumab, or infliximab, with or without methotrexate.

### H. ASSESSING TNFR1 ANTAGONIST AND TNFR1 ANTAGONIST/TNFR2 AGONIST CONSTRUCT ACTIVITY AND EFFICACY

[1151] If or as necessary, the constructs provided herein can be assessed for activity and efficacy using any assays, in vivo and/or in vitro, known to those of skill in the art, to assess properties of the constructs and/or suitability for treatment of particular diseases, disorders, or conditions. These assays also can be used to monitor treatment and/or predict response or select subjects for treatment. Exemplary assays are described in sections that follow.

[1152] In general, the antagonist constructs herein are those that are non-competitive; they generally are the constructs that lock the receptor in an inactive conformation, which as discussed above, means that selecting for high affinity is of lesser importance than selecting for antagonist activity.

[1153] 1. Disease Activity Score (DAS28)

[1154] The 28-joint-count Disease Activity Score (DAS28; or Disease Activity Score of 28 joints) is a measure of disease activity in rheumatoid arthritis (RA), and is a simplification of the original DAS score, which requires 44 joints to be counted. The 28 joints that are counted include proximal interphalangeal joints (10 joints), metacarpophalangeal joints (10 joints), wrists (2), elbows (2), shoulders (2) and knees (2). The DAS28 is indicative of RA disease activity and response to treatment, and thus, is used in clinical trials for the evaluation of therapeutics for RA. The DAS28 is based on a count of 28 swollen and tender joints, with a score ranging from 0-10, with higher values indicating higher disease activity. In addition to counting the number of swollen and tender joints (out of the 28), the DAS28 includes a measurement of the erythrocyte sedimentation rate (ESR) or C reactive protein (CRP), which are acute phase reactants/blood markers of inflammation, as well as a general health (GH) assessment, representing the patient's self-assessment of disease activity, scored on a 100 mm visual analog scale (VAS), with a value of 0 meaning “no activity” and a value of 100 meaning “highest activity possible.” The DAS28 usually is combined with other measurements of disease severity, such as pain and grip strength, and physical function is assessed using a Health Assessment Questionnaire (HAQ).

[1155] To calculate DAS28 values, using ESR or CRP levels, the following formulas are used, respectively:

DAS28(ESR)=0.56×√(TJC28)+0.28×√(SJC28)+0.014×GH+0.70×ln(ESR);

DAS28(CRP)=0.56×√(TJC28)+0.28×√(SJC28)+0.014×GH+0.36×ln(CRP+1)+0.96;

where TJC=tender joint count and SJC=swollen joint count.
A value of <2.6 indicates remission, value of ≤3.2 (>2.6 but ≤3.2) indicates low disease activity, a value of >3.2 but ≤5.1 indicates moderate disease activity, and a value of greater than 5.1 indicates high disease activity (i.e., active disease). An improvement (i.e., reduction in DAS28 score/value) of >1.2 indicates a good response/improvement; an improvement of >0.6 to ≤1.2 indicates a moderate response; and a DAS28 decrease of ≤0.6 indicates no improvement (see, e.g., Prevoo et al. (1995) Arthritis & Rheumatism 38(1):44-48; Wells et al. (2009) Ann. Rheum. Dis. 68:954-960).

[1156] The therapeutic efficacy of the selective TNFR1 antagonists, TNFR2 agonists, and/or bi-specific constructs containing the combination thereof, provided herein, can be evaluated by calculating the DAS28(ESR) or DAS28(CRP) before, during, and after treatment.

[1157] 2. SOMAscan® Proteomic Analysis and Other Proteomic Tools for Quantifying Analytes

[1158] The SOMAscan® proteomic assay (SomaLogic, Inc.; Boulder, Colo.) is an aptamer-based multiplexed, sensitive, quantitative and reproducible proteomic tool that can simultaneously measure the quantities of more than 5,000 protein analytes in a sample, such as serum, plasma or cerebrospinal fluid, as small as 150 μL in volume. Other biological matrices, such as cell culture supernatant, cell and tissue lysates, synovial fluid, and bronchoalveolar and nasal lavage, also can be used. Due to its ability to quantify a broad range or protein targets simultaneously, the SOMAscan® assay is optimized for protein biomarker discovery, and has been used to identify biomarker signatures associated with several diseases, including, for example, non-small cell lung cancer, Alzheimer's diseases, cardiovascular disease and inflammatory bowel disease. The SOMAscan® assay can be used to determine the protein signatures of, for example, RA patients, by analyzing samples taken before and after the initiation of treatment with the TNFR1 antagonist, TNFR2 agonist, and bispecific constructs provided herein. In this manner, the responses in patients can be monitored at an early time point in treatment and throughout treatment.

[1159] The SOMAscan® assay employs protein-capture reagents, known as Slow Off-rate Modified Aptamer (sold as SOMAmer® aptamers) reagents, which are short, single-stranded DNA-based protein affinity reagents constructed with chemically modified nucleotides that mimic amino acid side chains, have slow off-rates, and allow specific, high affinity binding to protein targets. The assay measures proteins in their native, folded conformations (i.e., tertiary structure), and does not detect unfolded and denatured (i.e., inactive) proteins. For the SOMAscan® assay, a SOMAmer®-protein binding step is followed by a series of partitioning and wash steps, whereby proteins in a biological sample are quantified by transforming each individual protein concentration into a corresponding SOMAmer® reagent concentration (SOMAmer®-based DNA signal), which then is quantified by standard DNA detection techniques, such as microarrays or qPCR. The assay takes advantage of SOMAmer reagents' dual nature as protein affinity-binding reagents with defined three-dimensional structures, and as containing unique nucleotide sequences recognizable by specific DNA hybridization probes.

[1160] SOMAmer® reagents are prepared with three tags, and contain a fluorophore linked to biotin via a photocleavable linker. Briefly, for the assay, the biological sample of interest is diluted, and then incubated with the respective SOMAmer® reagent mixes that are pre-immobilized onto streptavidin (SA)-coated beads. The SOMAmer® reagents bind to proteins in the biological sample, and the beads are washed to remove unbound proteins. Any non-specific complexes that form possess fast off-rates. Proteins that remain bound to their cognate SOMAmer® reagents are tagged using an NHS-biotin reagent, and a polyanionic competitor solution is added that breaks up any non-specific complexes. Protein-SOMAmer® complexes and unbound (free) SOMAmer® reagents are released from the streptavidin beads by cleaving the photocleavable linker using ultraviolet light. The photo-cleavage eluate, which contains all SOMAmer® reagents (some bound to biotin-labeled protein and some free), then is incubated with a second streptavidin-coated bead that binds the biotinylated proteins and the biotinylated protein-SOMAmer® complexes, and unbound material is removed by subsequent washing steps. In the final elution step, protein-bound SOMAmer® reagents are released from their cognate proteins using denaturing conditions, and the SOMAmer® reagents are quantified by standard DNA quantification techniques, such as by hybridization to custom DNA microarrays and measurement of the fluorophore tag. The data are reported in relative fluorescent units (RFUs), following normalization and calibration, and the measured SOMAmer® reagent signals correlate with the protein levels found in the biological sample (see, e.g., Gold et al. (2010) PLoS ONE 5(12):e15004; Candia et al. (2017) Sci. Reports 7:14248; Tanaka et al. (2018) Aging Cell. 17:e12799).

[1161] 3. Transcriptome Analysis to Predict Responsiveness to Therapy and to Select Subjects Likely to Benefit from Treatment

[1162] Traditional anti-TNF therapies, i.e., TNF blockers, such as etanercept, infliximab and others, are met with ˜30% non-responsiveness in RA patients. There, however, are clinical markers that can predict the efficacy of these anti-TNF therapies. The analysis of genes that are differentially expressed following anti-TNF therapy with etanercept, using global transcriptome analysis to determine RNA expression signatures in peripheral blood mononuclear cells (PBMCs), has been performed. Similar transcriptome analyses can be performed to evaluate the efficacy of the TNFR1 antagonists and the TNFR1 antagonist/TNFR2 agonist constructs herein, and/or to evaluate patient responsiveness to them.

[1163] In an exemplary protocol, blood samples are obtained from patients before and after treatment, and PBMCs are separated using a Ficoll density gradient, after which the populations of CD3⁺, CD14⁺, CD19⁺ and CD56⁺ cells are evaluated using flow cytometry. Total RNA then is extracted, for example, using the Qiagen RNeasy® kit, and microarray analysis is used (e.g., using Affymetric® microarray technology) to analyze the expression profiles of tens of thousands of known genes in PBMCs to identify the profiles of responders/non-responders. The gene expression profiles can be determined at an early stage of treatment to quickly identify those who will be nonresponders. For example, by using this method to identify reliable biomarkers for predicting the therapeutic efficacy of etanercept in RA patients, gene pairs with a prediction accuracy of >89%, and gene triplets with a prediction accuracy of >95%, were identified. These include, for example, genes involved in TNF signaling via the NF-κB pathway, genes involved in NF-κB-independent signaling, and genes involved in the regulation of cellular and oxidative stress responses. For example, the gene triplets identified include TNFAIP3, encoding TNFα-induced protein 3, a zinc finger protein shown to inhibit NF-κB activation; PDE4B, encoding a (cAMP)-specific cyclic nucleotide phosphodiesterase that is involved in NF-κB-independent signal transduction; and RAPGEF1, encoding Rap guanine nucleotide-exchange factor 1, an activator of RAS signaling. The expression of all three of these genes was downregulated 3 days following administration of etanercept in responders compared to in nonresponders. Other genes evaluated include CCL4, CXCR4, CCL3, PIGO, FSD1, RUNX1, LGALS13, PTPRD, IL1B, ADAM12, and HCG4P6 (see, e.g., Koczan et al. (2008) Arthritis Research & Therapy 10:R50).

[1164] The expression levels of a subset of genes of interest can be measured by quantitative real-time PCR (RT-PCR) using pre-designed primers and probes, to validate the results obtained with microarray analysis. To calculate the change in gene expression of selected genes, the ΔΔC_{T} method can be used, whereby the threshold cycle (C_{T}) values for specific mRNA expression in a sample are normalized to the C_{T} values of, for example, GAPDH mRNA, in the sample, and the gene expression change (ΔΔC_{T}) is defined by the difference in the C_{T} values after and before treatment (see, e.g., Koczan et al. (2008) Arthritis Research & Therapy 10:R50).

[1165] 4. L929 Cytotoxicity Assay

[1166] TNFR1-mediated processes and cellular responses can be determined, for example, by evaluating TNF-induced cell death with an L929 cytotoxicity assay, whereby the TNFR1 antagonist inhibits TNF-induced cytotoxicity. Briefly, L929 mouse fibroblasts are plated in microtiter plates and incubated overnight with the TNFR1 antagonist, 100 pg/ml TNF and 1 mg/ml actinomycin D. Cell viability is measured by reading absorbance at 490 nm following incubation with 3-(4,5-dimethylthiazol-2-yl)-5-(3-carboxymethoxyphenyl)-2-(4-sulfophenyl)-2H-tetrazolium (MTS). The TNFR1 antagonist decreases TNF-mediated cytotoxicity, leading to an increase in absorbance, as compared to a TNF only control.

[1167] 5. HeLa IL-8 Assay

[1168] The activity of the TNFR1 antagonists can be determined using a HeLa IL-8 assay, where the ability of the antagonists to neutralize TNF-induced IL-8 secretion in HeLa cells is evaluated. Briefly, HeLa cells are plated in microtiter plates overnight, in the presence of varying concentrations of TNFR1 antagonist and 300 μg/ml TNF. The supernatant then is aspirated off, and the concentration of IL-8 is measured using a sandwich ELISA. TNFR1 antagonist activity decreases IL-8 secretion into the supernatant, compared to a TNF only control.

[1169] 6. HUVEC Assay

[1170] A human umbilical cord vein endothelial cell (HUVEC) assay can be used to determine the activity of the TNFR1 antagonists herein. Treatment of HUVECs with TNF results in the upregulation of VCAM-1 expression on the cells, which can be determined, for example, by ELISA. Since TNFR1 antagonists inhibit the action of TNF, VCAM-1 expression is reduced in HUVECs in the presence of the antagonists. The level of inhibition of TNF-induced VCAM-1 expression by the TNFR1 antagonist then is determined by plotting the concentration of the antagonist against the percent inhibition of VCAM-1 expression.

[1171] In accord with a protocol for this assay, HUVECs are cultured overnight, and then incubated with the TNFR1 antagonist for 1 hour, followed by stimulation with TNF (1 ng/mL) for 23 hours. Cells incubated with medium only are used as a negative control, and cells incubated with TNF only are used as a positive control. Cell culture supernatants a then are aspirated, and the cells are washed three times with ice cold PBS, and lysed by the addition of ice-cold Tris-Glycerol lysis buffer (40 mM Tris, 274 mM NaCl, 2% Triton-X-100, 20% glycerol, 50 mM NaF, 1 mM Na₃VO₄, 1× protease inhibitor tablet per 10 mL), then incubated for 15 mins on ice. The cell lysates then are used in a VCAM-1 sandwich ELISA. To calculate inhibition of TNF-induced VCAM-1 expression, the % inhibition of maximal VCAM-1 expression (i.e., as measured in the positive control)={100−[(OD value at antagonist conc.)/(OD value of positive control)]}×100. The EC₅₀ values then are determined by plotting antagonist concentration against percentage inhibition, for example, using available software such as GraphPad Prism software.

[1172] 7. Quantification and Evaluation of Treg Cell Activity

[1173] To determine the effects of the TNFR1 antagonist and TNFR1 antagonist/TNFR2 agonist constructs on Tregs, the numbers of Tregs can be quantified before and after treatment, as well as during treatment, by isolating peripheral blood mononuclear cells (PBMCs) from blood samples, such as by using Ficoll-Paque methods, followed by monoclonal antibodies (mAbs) and paramagnetic beads, or other similar methods known in the art, to isolate CD4⁺CD25⁺ Tregs, as well as CD4⁺CD25⁻ non-regulatory T cells. Using flow cytometry, and immunostaining with mAbs against CD4 and CD25 (for Tregs), or CD4 and CTLA-4 (for non-regulatory T cells), the numbers of each cell type can be quantified (see, e.g., Vigna-Perez et al. (2005) Clin. Exp. Immunol. 141(2):372-380).

[1174] CD4⁺CD25⁺ Tregs suppress the proliferation of CD4⁺CD25⁻ T cells. To test for the activity of Tregs from treated patients, a cell proliferation assay can be used, in which the Tregs and T cells are cultured together for 48 hours with phytohemagglutinin (PHA, to stimulate T cells). ³H-TdR (tritiated thymidine) is added for the last 12 hours of culture, and cells then are harvested, and proliferation is determined using a liquid scintillation counter. CD4⁺CD25⁻ T cells, cultured alone, are used as a control, and results are expressed in terms of the stimulation index (SI) of cell proliferation, which is calculated using the formula:

SI=(cpm of cells with PHA)÷(cpm of cells cultured with medium only),

where cpm is counts per minute, as determined by the counted radioactivity (see, e.g., Vigna-Pérez et al. (2005) Clin. Exp. Immunol. 141(2):372-380).

[1175] To test for immune reactivity against M. tuberculosis, PBMCs are cultured for 72 hours in complete medium, in the presence of a whole protein extract of the bacterium. ³H-TdR (tritiated thymidine) is added for the last 12 hours of culture, and cells then are harvested, and proliferation is determined using a liquid scintillation counter. Results are expressed as the stimulation index, as described above. For in vivo reactivity against M. tuberculosis, a standard PPD (purified protein derivative) skin test can be used (see, e.g., Vigna-Pérez et al. (2005) Clin. Exp. Immunol. 141(2):372-380).

[1176] 8. Evaluation of Binding Properties of the TNFR1 Antagonist/TNFR2 Agonist Constructs

[1177] The specific binding of an antibody or antibody fragment or multi-specific constructs, such as the constructs provided herein, to TNFR1 and/or TNFR2 (e.g., human TNFR1 and/or TNFR2) can be assessed by any of a variety of known methods. The affinity can be represented quantitatively by various metrics, including the concentration of the TNFR1 antagonist, TNFR2 agonist, or multi-specific construct, needed to achieve half-maximal potentiation of TNFR1 and/or TNFR2 signaling in vitro (EC₅₀), and the equilibrium constants (K_{D}) of the antagonist-TNFR1 and/or agonist-TNFR2 complex dissociation. The equilibrium constant, K_{D}, which describes the interaction of TNFR1 or TNFR2 with a binder, such as a construct (binder) provided herein, is the chemical equilibrium constant for the dissociation reaction of a TNFR1-binder construct complex or TNFR2-binder complex into solvent-separated TNFR1 or TNFR2 and binder molecules that do not interact with one another.

[1178] The TNFR1 antagonists, TNFR2 agonists, and multi-specific constructs also can be characterized by a variety of in vitro binding assays. Examples of experiments that can be used to determine the K_{D} or EC₅₀ include, for example, surface plasmon resonance (SPR, e.g., BIAcore™ analysis), isothermal titration calorimetry, fluorescence anisotropy, and ELISA-based assays, among others. ELISA is a particularly useful method for analyzing antibody activity, as such assays typically require minimal concentrations of antibodies. A common signal that is analyzed in a typical ELISA assay is luminescence, which is typically the result of the activity of a peroxidase conjugated to a secondary antibody that specifically binds a primary antibody (e.g., a TNFR1-antagonist or TNR1 antagonist-TNFR2-agonist bi-specific construct provided herein).

[1179] The kinetics of association and dissociation of the TNFR1 antagonist with TNFR1, or the TNFR2 agonist with TNFR2 can be quantitatively characterized, for example, by monitoring the rate of antibody-antigen complex formation according to established procedures. For example, one can use surface plasmon resonance (SPR) to determine the rate constants for the formation (kₒₙ) and dissociation (k_{off}) of an antagonist-TNFR1 or agonist-TNFR2 complex. The equilibrium constant (K_{D}) can be determined from these data, since the equilibrium constant of this unimolecular dissociation can be expressed as the ratio of the k_{off} to kₒₙ values. SPR is a technique that is advantageous for determining kinetic and thermodynamic parameters of receptor-antibody (or other binder) interactions, since the experiment does not require that one component be modified by attachment of a chemical label. Rather, the receptor typically is immobilized on a solid metallic surface which is treated in pulses with solutions of increasing concentrations of antibody or binder (i.e., TNFR1 antagonist or TNFR2 agonist, or bi-specific constructs thereof). Antibody-receptor binding induces distortion in the angle of reflection of incident light at the metallic surface, and this change in refractive index over time as antibody is introduced to the system can be fit to established regression models known in the art in order to calculate the association and dissociation rate constants of an antibody-receptor interaction.

[1180] 9. Antibody-Dependent Cellular Cytotoxicity (ADCC) and Complement-Dependent Cytotoxicity (CDC) Assays

[1181] Antibody-dependent cellular cytotoxicity (ADCC) and complement-dependent cytotoxicity (CDC) assays can be used to evaluate the immune effector functions/cytotoxicity of the TNFR1 antagonist, TNFR2 agonist, and multi-specific constructs provided herein that contain an Fc monomer or dimer. In general the Fc portion(s) is/are modified to eliminate or substantially reduce (to eliminate or reduce adverse side effects to a tolerable level) ADCC or ADCC and CDC effector functions. Such assays are well known in the art (see, e.g., Ying et al. (2014) mAbs 6(5):1201-1210). For example, for an exemplary ADCC assay, mesothelin-negative A431 or mesothelin-positive H9 cells are incubated with the TNFR1 antagonist, TNFR2 agonist, or multi-specific constructs provided herein for 30 min, followed by the addition of the target cells to wells containing the effector cells (e.g., PBMCs), at an effector to target cell ratio of 50:1. After a 24 hour incubation, the lysis of the target cells is measured using the CytoTox-ONE Homogenous Membrane Integrity Assay (Promega), according to the manufacturer's protocol.

[1182] For an exemplary CDC assay, A431 and H9 cells are washed in serum-free RPMI and density adjusted to 1 million/mL in serum-free RPMI. 50 μL of cell suspension then is incubated with 50 μL of TNFR1 antagonist, TNFR2 agonist, or multi-specific construct dilution in RPMI. A negative control contains 50 μL of cell suspension with 50 μL of RPMI, and a positive control contains target cells lysed with 1% Triton X-100 in a final volume of 150 μL. Fresh human plasma is diluted in PBS (1:4) and clarified with centrifugation, and then 50 μL of diluted plasma is added to each cell/construct mixture and incubated in 96-well plates at 37° C., to allow for complement-mediated cell lysis. Following a 3 hour incubation, 100 μL of supernatant is transferred to a white plate, and 100 μL substrate from the CytoTox-ONE Homogenous Membrane Integrity Assay Kit (Promega) is added. The plate then is incubated for 10 min at room temperature, and fluorescent signals are read using a fluorimeter, with an excitation wavelength of 530 nm and emission wavelength of 590 nm. The CDC of target cells is expressed as the percent of the experimental sample to the positive control.

[1183] 10. Disease Models

[1184] The selective TNFR1 antagonists, TNFR2 agonists, and multi-specific constructs, provided herein, can be assessed in any clinically relevant disease model known to one of skill in the art, to determine their effects on autoimmune and inflammatory and other diseases or disorders that are mediated by or involve TNF in their etiology. Exemplary disease models include, but are not limited to, collagen-induced arthritis (CIA), rheumatoid arthritis synovial membrane mononuclear cell cultures, the Tg197 mouse model of arthritis, AARE mouse models of arthritis/IBD, the mouse dextran sulfate sodium (DSS) induced model of IBD, and the experimental autoimmune encephalomyelitis (EAE) model for multiple sclerosis. Other models are known to those of skill in the art. See, e.g., Malaviya et al. (2017) Pharmacol Ther. 180:90-98, which provides numerous models for testing the constructs for treating inflammatory lung diseases; Feldmann et al. (2020) Lancet 395:1407-1409, directed to use of anti-TNF therapies, and models, treatments for COVID-19; Shi et al. (2013) Crit. Care 17(6):R301, use of anti-TNF therapies for treating H1N1, and models for viral infection; and Orti-Casan et al. (2019) Front. Neurosci. 13:49, which describes that activating TNFR2 for treating Alzheimer's disease is advantageous, evidencing the approach herein that TNF blockers, which inhibit TNFR1 and TNFR2, are problematic. The following is a non-exhaustive discussion of diseases, disorders, and conditions that can be treated with constructs provided herein, and exemplary models for each. These are exemplary; the skilled person can select appropriate models for a particular construct and targeted disease, disorder, or condition. Because the anti-TNFR1 and TNFR2 antagonist/agonist constructs provided herein are intended for use for targeting human TNFR1/TNFR2, they are not expected to work as well in reacting/interacting with TNFR1/TNFR2 from non-human, particularly non-primate, species. For testing, in non-human models, such as rodent models, the model, such as a mouse model, is transgenic for human TNFR1 and human TNFR2. They can be used against a background of murine TNFR1/2 knockout mice for in vivo models of inflammation and autoimmune disease. Alternatively, severely immunocompromised mice (such as, NOD/NSG mice) mouse transplanted with human CD34+ stem cells, can be used for this purpose. Alternatively, human rheumatoid arthritis synovial cells can be transplanted into immunodeficient mice, resulting in RA-like inflammation (see, e.g., Schinnerling et al. (2019) Front Immunol. 10:203, for a description of such models).

[1185] a. Collagen-Induced Arthritis (CIA)

[1186] Type II collagen-induced arthritis (CIA) can be induced in mice as a model of autoimmune inflammatory joint disease that is histologically similar to RA, and is characterized by inflammatory synovitis, pannus formation, and erosion of cartilage and bone. To induce CIA, bovine type II collagen (B-CII), in the presence of complete Freund's adjuvant, is injected intradermally at the base of the tail. After 21 days, mice can be re-immunized using the same protocol. To examine the effects of the selective TNFR1 antagonists, TNFR2 agonists, and multi-specific constructs provided herein, 3 weeks following the initial challenge with B-CII, or upon the development of signs of arthritis, selective TNFR1 antagonists, TNFR2 agonists, or multi-specific constructs, or control can be administered intraperitoneally twice weekly for 3 weeks. Mice can be sacrificed 7 weeks following the initial immunization for histologic analysis.

[1187] To assess the therapeutic effect of the constructs on established disease, they can be administered daily for a total of 10 days following the onset of clinical arthritis in one or more limbs. The degree of swelling in the initially affected joints can be monitored by measuring paw thickness using calipers. Serum can be drawn from mice for the measurement of proinflammatory cytokines and chemokines, such as, for example, granulocyte-macrophage colony stimulating factor (GM-CSF), interleukin-10 (IL-10), IL-1β, TL-6, IL-8, RANTES (CCL5) and monocyte chemoattractant protein 1 (MCP-1; also known as CCL2).

[1188] In another example, primate models are available for RA treatments. Response of tender and swollen joints (e.g., as measured by clinical arthritic scores) can be monitored in subjects treated with recombinant therapeutic TNFR1 antagonistic, TNFR2 agonistic, or bispecific constructs, and controls, to assess therapeutic efficacy and treatment.

[1189] b. Rheumatoid Arthritis Synovial Membrane Mononuclear Cell Cultures

[1190] Human rheumatoid arthritis (RA) synovial membrane mononuclear cells (MNCs), which express TNFR1 and TNFR2, also can be used to test the therapeutic efficacy of the constructs provided herein. The RA synovial membrane MNCs can be obtained from RA patients undergoing joint replacement surgery, and cultured ex vivo to evaluate RA synovial cell cytokine production and regulation. RA synovial membrane MNC cultures produce inflammatory cytokines and chemokines spontaneously, in the absence of exogenous stimulation; antibody-mediated neutralization of TNF, and the selective blockade of TNFR1, such as by constructs provided herein, in these cultures inhibits the production of proinflammatory cytokines and chemokines, such as GM-CSF, IL-10, IL-1β, IL-6, IL-8, RANTES (CCL5) and MCP-1 (CCL2).

[1191] In an exemplary assay, to prepare the RA synovial membrane MNCs, RA synovial membrane tissues are dissected into small pieces, incubated for 1 hour at 37° C. with 5 mg/ml collagenase A and 0.15 mg/ml DNase in RPMI 1640, after which the digested tissue is passed through a 170 μm filter and washed 3 times with RPMI 1640 containing 100 units/ml of streptomycin, 100 μg of penicillin, and 10% FCS. Heterogeneous RA synovial membrane MNCs then are used without passage. For ex vivo cell culture, single-cell suspensions of RA synovial membrane MNCs are cultured in RPMI 1640 medium with 5% FCS in 96-well flat-bottomed plates (2×10⁵ cells/well) for 2-5 days at 37° C. and 5% CO₂, in the presence or absence of the TNFR1 antagonistic, TNFR2 agonistic, or bispecific constructs, or control. The supernatant then is collected and used immediately, or stored at −20° C., for analysis by cytokine and chemokine ELISAs (see, e.g., Schmidt et al. (2013) Arthritis & Rheumatism 65(9):2262-2273). Alternatively, the cytokines in culture supernatants can be quantified by cytokine bead array analysis.

[1192] c. Tg197 Mouse Model of Arthritis

[1193] The Tg197 transgenic strain of mice, a mouse model of erosive arthritis, is a well-established animal model of RA. Tg197 mice are human TNF-transgenic C57BL/6 mice that overexpress human TNF and develop a symmetric polyarthritis with pannus formation, bone destruction, and cartilage damage that is characteristic of human RA. In addition to displaying features of chronic destructive joint disease, this model exhibits symptoms, such as enthesitis or bilateral sacroiliitis, which are characteristic of other inflammatory diseases, such as spondyloarthritis (Blüml et al. (2010) Arthritis & Rheumatism 62(6):1608-1619). Tg197 mice develop arthritis with 100% penetrance and provide a fast in vivo model for evaluating human therapeutics that target RA. For example, the Tg197 mouse model was used to evaluate the therapeutic efficacy of infliximab (originally sold as Remicade®), the first anti-TNF therapeutic successfully applied in the clinic, and is recommended by the FDA for screening potential anti-RA therapeutics.

[1194] Tg197 mice carry five copies of a human TNF gene construct, in which the 3′-region, containing the 3′-untranslated and 3′-flanking sequences, is exchanged with the 3′-region of the human β-globin gene. This gene construct is microinjected into mouse zygotes, creating an in vivo model of deregulated TNF gene expression, since a set of highly conserved UA-rich sequences at the 3′-untranslated region of TNF mRNA is critical for the regulation of mRNA stability and translation efficiency (see, e.g., Keffer et al. (1991) EMBO J. 10(13):4025-4031).

[1195] d. ΔARE Mouse Model of Arthritis/IBD

[1196] Mice with a deletion in the 3′ AU-rich elements (AREs) of the TNF mRNA (Tnf^{ΔARE}) overproduce TNF and develop an inflammatory bowel disease that is histopathologically similar to Crohn's disease, at between 4-8 weeks of age. The mice also develop clinical signs of RA. The efficacy of the TNFR1 antagonists, TNFR2 agonists, and bispecific constructs, provided herein, can be evaluated by assessing the inhibitory effects on the Crohn's-like pathology and arthritis in Tnf^{ΔARE} mice following intraperitoneal injection (see, e.g., U.S. Pat. No. 9,028,822).

[1197] e. Humanized TNF/TNFR2 Mice

[1198] A limitation in the development of therapeutics targeting the TNF/TNFR2 signaling pathway is the lack of preclinical animal models, as many human anti-TNF therapeutics do not interact with murine TNF or TNFR2, and human TNF can bind to and engage murine TNFR1, but not TNFNR2. Humanized TNF/TNFR2 mice, which carry a functional human TNF-TNFR2 (hTNF-hTNFR2) signaling module, can be used to evaluate therapeutics, such as agonistic and antagonistic antibodies constructs human TNF or human TNFR2, in various models of autoimmunity. Such TNF/TNFR2 doubly humanized mice can be used, for example, to evaluate the TNFR2 agonist constructs provided herein.

[1199] Humanized TNF/TNFR2 mice can be generated as described in Atretkhany et al. (2018) Proc. Natl. Acad. Sci. U.S.A. 115(51):13051-13056. Briefly, human TNFR2 knock-in (hTNFR2KI) and human TNF knock-in (hTNFKI) mice are generated using standard genetic engineering techniques. The hTNFKI mice, in which the human TNF gene has replaced the mouse TNF gene, then are crossed with the hTNFR2KI mice, containing a humanized TNFR2 ligand-binding portion, and then intercrossed to generate doubly humanized double homozygous hTNFKI×hTNFR2KI mice. To assess the role of TNFR2 signaling in particular cells, e.g., Tregs, two LoxP sites are inserted within the hTNFR2 locus, to allow for the conditional Cre-mediated ablation of the extracellular portion of TNFR2. For Treg-specific deletion of TNFR2, these mice are crossed with FoxP3-Cre transgenic mice (see, e.g., Atretkhany et al. (2018) Proc. Natl. Acad. Sci. U.S.A. 115(51):13051-13056).

### I. METHODS OF PRODUCING NUCLEIC ACIDS ENCODING TNFR1 ANTAGONIST CONSTRUCTS AND TNFR1 ANTAGONIST/TNFR2 AGONIST CONSTRUCTS

[1200] TNFR1 antagonist polypeptides, TNFR2 agonist polypeptides, and TNFR1 antagonist/TNFR2 agonist polypeptide constructs, provided herein, that are polypeptides can be obtained by methods well known in the art for protein purification and recombinant protein expression, and also for recombinant antibody preparation. Constructs provided herein that include portions, such as linkers, that are not polypeptides can be prepared by chemical conjugation methods as appropriate. The polypeptide portions can be produced by standard recombinant technology, such as by expression in a suitable host (bacterial if no glycosylation is desired, or in eukaryotic cells, such as HEK293 and CHO cells, if glycosylated forms are desired). Active antibodies and antibody fragments have been produced in E. coli, but these often have aggregation and solubility problems because of improper folding, which can be remedied by further mutagenesis of the coding sequences (see, e.g., Kunz et al. (2018) Sci Rep. 8(1):7934).

[1201] Polypeptides also can be synthesized chemically. Fusion polypeptides can be synthesized by standard methods of recombinant production. The components, discussed above, of the various constructs can be separately synthesized, and combined using standard methods to produce the constructs.

[1202] Nucleic acid encoding the polypeptide constructs or polypeptide portions thereof, including modified or variant, including truncated forms, can be prepared from nucleic acid. Modified or variant polypeptides can be engineered from nucleic acid encoding wild type polypeptides using standard recombinant DNA methods. For example, modified TNF polypeptides, such as the TNF muteins, that selectively bind to TNFR1 or TNFR2, and/or that selectively antagonize TNFR1 or selectively agonize TNFR2, can be engineered from wild type TNF, such as by site-directed mutagenesis of the encoding DNA. Any methods known to those of skill in the art can be used. The following discussion and description in the Examples is exemplary.

[1203] 1. Isolation or Preparation of Nucleic Acids Encoding TNFR1 Antagonist and TNFR2 Agonist Polypeptides

[1204] Nucleic acids encoding TNFR1 antagonist polypeptides, TNFR2 agonist polypeptides, and TNFR1 antagonist/TNFR2 agonist polypeptide constructs can be cloned or isolated using any available methods known in the art for cloning and isolating nucleic acid molecules. Such methods include polymerase chain reaction (PCR) amplification of nucleic acids and screening of libraries, including nucleic acid hybridization screening, antibody-based screening and activity-based screening. For example, when the polypeptides are produced by recombinant means, any method known to those of skill in the art for identification of nucleic acids that encode desired polypeptides can be used.

[1205] Nucleic acid molecules encoding the polypeptides herein can be synthetically produced, or can readily be isolated and sequenced, as needed, using conventional procedures (e.g., by using oligonucleotide probes that are capable of binding specifically to genes encoding the heavy and/or light chains of the antibody fragments, such as, e.g., single domain antibodies (dAbs), scFv fragments, and Fab antibody fragments). For example, any cell source known to produce or express a TNFR1 antagonist or TNFR2 agonist antibody or fragment(s) thereof can serve as a source of such DNA. In another example, once the sequence of the DNA encoding the TNFR1 antagonist or TNFR2 agonist antibody or fragment(s) thereof is determined, nucleic acid sequences can be constructed using gene synthesis techniques.

[1206] Methods for amplification of nucleic acids can be used to isolate nucleic acid molecules encoding a desired polypeptide, including for example, polymerase chain reaction (PCR) methods. Exemplary of such methods include use of a Perkin-Elmer Cetus thermal cycler and Taq polymerase (Gene Amp). A nucleic acid containing material can be used as a starting material from which a desired polypeptide-encoding nucleic acid molecule can be isolated. For example, DNA and mRNA preparations, cell extracts, tissue extracts, fluid samples (e.g., blood, serum, and saliva), and samples from healthy and/or diseased subjects can be used in amplification methods. The source, which generally will be from human sources, can be, if appropriate from any eukaryotic species including, but not limited to, vertebrate, mammalian, human, porcine, bovine, feline, avian, equine, canine, and other primate sources. Nucleic acid libraries also can be used as a source of starting material. Primers can be designed to amplify a desired polypeptide. For example, primers can be designed based on expressed sequences from which a desired polypeptide is generated. Primers can be designed based on back-translation of a polypeptide amino acid sequence. If desired, degenerate primers can be used for amplification. Oligonucleotide primers that hybridize to sequences at the 3′ and 5′ termini of the desired sequence can be used as primers to amplify sequences by PCR from a nucleic acid sample. Primers can be used to amplify the entire full-length polypeptide, or a truncated sequence thereof, such as a nucleic acid encoding any of the TNFR1 antagonist and TNFR1 agonist polypeptides, as well as the TNFR1 antagonist/TNFR2 agonist polypeptide constructs, provided herein. Nucleic acid molecules generated by amplification can be sequenced and confirmed to encode the desired polypeptide or construct.

[1207] Mutagenesis techniques can be employed to generate further modified forms of a TNFR1 antagonist or TNFR2 agonist antibody or fragment(s) thereof and to produce modified forms of the activity modifier, such as Fc and hinge regions, and linker portions. The DNA also can be modified. For example, gene synthesis and routine molecular biology techniques can be used to effect insertion, deletion, addition or replacement/substitution of nucleotides. Additional nucleotide sequences can be joined to a polypeptide-encoding nucleic acid molecule, including linker sequences containing restriction endonuclease sites for the purpose of cloning the synthetic gene into a vector, for example, a protein expression vector or a vector designed for the amplification of the core polypeptide-coding DNA sequences. Additional nucleotide sequences specifying functional DNA elements, such as promoters, enhancers, and IRES sequences, can be operatively linked to a polypeptide-encoding nucleic acid molecule. Examples of such sequences include, but are not limited to, promoter sequences designed to facilitate intracellular protein expression, and secretion sequences, for example heterologous signal sequences, designed to facilitate protein secretion. Such sequences are known to those of skill in the art. Additional nucleotide sequences, such as sequences specifying protein binding regions, also can be linked polypeptide-encoding nucleic acid molecules. Such regions include, but are not limited to, sequences that facilitate uptake of a polypeptide into specific target cells, or that otherwise alter or enhance the pharmacokinetics of the product of a synthetic gene.

[1208] Tags and/or other moieties can be added, for example, to aid in detection or affinity purification of the polypeptide. For example, additional nucleotide sequences, such as sequences of bases specifying an epitope tag or other detectable marker, also can be linked to polypeptide-encoding nucleic acid molecules. Exemplary of such sequences include nucleic acid sequences encoding a SUMO tag, or His tag, or Flag Tag.

[1209] It is understood that any of the amino acid sequences provided herein can be reverse-translated (also called back translated), using standard methods commonly used by those skilled in the art, to generate corresponding encoding nucleic acid sequences, which can be cloned into vectors and expressed to generate the constructs, including polypeptides, antibodies and antibody fragments, provided herein. For example, there are several online tools are available to convert protein sequences to encoding DNA sequences, such as bioinformatics.org/sms2/rev_trans.html; biophp.org/minitools/protein_to_dna/demo.php; vivo.colostate.edu/molkit/rtranslate/; ebi.ac.uk/Tools/st/emboss_backtranseq/; molbiol.ru/eng/scripts/01_19.html; and geneinfinity.org/sms/sms_backtranslation.html. Such reverse translated sequences can be inserted into any of the expression vectors provided herein for the expression and production of the provided antibodies or fragments. Anti-TFR1 and anti-TNFR2 antibodies, such as the TNFR1 antagonist and TNFR2 agonist constructs can be expressed as full-length proteins or less than full length proteins. For example, antibody fragments, such as, but not limited to, single domain antibodies (dAbs), scFv fragments, and Fab fragments, can be expressed.

[1210] The identified and isolated nucleic acids then can be inserted into an appropriate cloning vector. A large number of vector-host systems known in the art can be used. Possible vectors include, but are not limited to, plasmids or modified viruses, but the vector system must be compatible with the host cell used. Such vectors include, but are not limited to, bacteriophages such as lambda derivatives, or plasmids such as pCMV4, pBR322 or pUC plasmid derivatives or the pBluescript vector (Stratagene, La Jolla, Calif.). The insertion into a cloning vector can, for example, be accomplished by ligating the DNA fragment into a cloning vector which has complementary cohesive termini. Insertion can be effected using TOPO cloning vectors (Invitrogen, Carlsbad, Calif.).

[1211] If the complementary restriction sites used to fragment the DNA are not present in the cloning vector, the ends of the DNA molecules can be enzymatically modified. Alternatively, any site desired can be produced by ligating nucleotide sequences (linkers) onto the DNA termini; these ligated linkers can contain specific chemically synthesized oligonucleotides encoding restriction endonuclease recognition sequences. In an alternative method, the cleaved vector and polypeptide gene can be modified by homopolymeric tailing.

[1212] Recombinant molecules can be introduced into host cells via, for example, transformation, transfection, infection, electroporation and sonoporation, so that many copies of the gene sequence are generated. In specific embodiments, transformation of host cells with recombinant DNA molecules that incorporate the isolated polypeptide gene, cDNA, or synthesized DNA sequence, enables generation of multiple copies of the gene. Thus, the gene can be obtained in large quantities by growing transformants, isolating the recombinant DNA molecules from the transformants and, when necessary, retrieving the inserted gene from the isolated recombinant DNA.

[1213] For expression of antibodies and fragments thereof, generally, a nucleic acid molecule encoding the heavy chain of an antibody is cloned into a vector, and a nucleic acid molecule encoding the light chain of an antibody is cloned into a vector. Methods for production of antibodies and portions thereof are well known (see, e.g., U.S. Pat. Nos. 4,816,567, 6,331,415, and 7,923,221, and numerous other seminal patents). The genes can be cloned into a single vector for dual expression thereof, or into separate vectors. If desired, the vectors also can contain further sequences encoding additional constant region(s) or hinge regions to generate other antibody forms. The vectors can be transfected and expressed in host cells. Expression can be in any cell expression system known to one of skill in the art. For example, host cells include cells that do not otherwise produce immunoglobulin protein, to obtain the synthesis of antibodies in the recombinant host cells. For example, host cells include, but are not limited to, simian COS cells, Chinese hamster ovary (CHO) cells, such as for example, CHO-DG44 (DHFR⁻) and FreeStyle™ CHO-S cells, Invitrogen), 293FS cells, HEK293 cells, NSO cells or other myeloma cells. Other expression vectors and host cells are described herein.

[1214] The constructs provided herein, including the TNFR1 antagonists, TNFR2 agonists and TNFR1 antagonist/TNFR2 agonist constructs, can be generated or expressed as full-length constructs or less than full-length, including, but not limited to, antigen-binding fragments, such as, for example, single domain antibody (dAb), Fab, Fab′, Fab hinge, F(ab′)₂, single-chain Fv (scFv), scFv tandem, Fv, dsFv, scFv hinge, scFv hinge (ΔE), diabody, Fd and Fd′ fragments. There are various techniques for the production of antibody fragments. For example, fragments can be derived via proteolytic digestion of intact antibodies (see, e.g., Morimoto and Inouye (1992) Journal of Biochemical and Biophysical Methods 24:107-117; Brennan et al. (1985) Science 229:81-83). Fragments also can be produced directly by recombinant host cells. For example, dAb, Fab, Fv and scFv antibody fragments can all be expressed in and secreted from host cells, such as E. coli, CHO cells or HEK293 cells, thereby facilitating production of large amounts of these fragments. F(ab′)₂ fragments can be produced by chemically coupling Fab′-SH fragments (see, e.g., Carter et al. (1992) Bio/Technology, 10:163-167), or they can be isolated directly from recombinant host cell cultures. In some examples, the TNFR1 antagonist constructs include a single domain antibody (dAb; described, for example, in International Application Publication Nos. WO 2004/058820, WO 2004/081026, WO 2005/035572, WO 2006/038027, WO 2007/049017, WO 2008/149144, WO 2008/149148, WO 2010/094720, WO 2011/006914, WO 2011/051217, WO 2012/172070, WO 2012/104322, and WO 2015/104322; Enever et al., (2015) Protein Engineering, Design & Selection 28(3):59-66, U.S. Application Publication Nos. 2006/0083747, 2010/0034831, and 2012/0107330; and U.S. Pat. Nos. 9,028,817 and 9,028,822), a single-chain Fv fragment (scFv) (see, e.g., International Application Publication Nos. WO 2017/174586, and WO 2008/113515; see, also, Richter, F. Thesis, entitled “Evolution of the Antagonistic Tumor Necrosis Factor Receptor One-Specific Antibody ATROSAB,” Universität Stuttgart, 2015; available from pdfs.semanticscholar.org/d8e7/8b87d76dce36225cid497939ef37445cfa8a.pdf), or a Fab fragment (see, e.g., International Application Publication Nos. WO 2017/174586 and WO 2008/113515; see, also, Richter, F. Thesis, entitled “Evolution of the Antagonistic Tumor Necrosis Factor Receptor One-Specific Antibody ATROSAB,” Universität Stuttgart, 2015; available from pdfs.semanticscholar.org/d8e7/8b87d76dce36225cid497939ef37445cfa8a.pdf). dAb, Fv and scFv fragments have intact combining sites but are devoid of constant regions; thus, they are suitable for reduced non-specific binding during in vivo use. dAb and scFv fusion proteins can be constructed to attach an effector protein (e.g., an IgG Fc) at either the amino- or the carboxy-terminus of a dAb or scFv. The antibody fragment can also be a linear antibody (see, e.g., U.S. Pat. No. 5,641,870). Such linear antibody fragments can be monospecific or bispecific. Other techniques for the production of antibody fragments are known to one of skill in the art.

[1215] Upon expression, antibody heavy and light chains, or fragment(s) thereof, pair by interchain disulfide bonds to form a full-length antibody or fragment thereof. For example, for expression of a full-length Ig, sequences encoding the V_{H}-C_{H}1-hinge-C_{H}2-C_{H}3 can be cloned into a first expression vector, and sequences encoding the V_{L}-C_{L} domains can be cloned into a second expression vector. Upon co-expression, the full-length heavy and light chains are interlinked by disulfide bonds to generate a full-length antibody. In another example, to generate a Fab, sequences encoding a fragment containing the V_{H} and C_{H}1 regions can be cloned into a first expression vector, and sequences encoding the V_{L}-C_{L} domains can be cloned into a second expression vector. Upon co-expression, the heavy chain pairs with a light chain to generate a Fab monomer. Sequences of C_{H}1, hinge, C_{H}2 and/or C_{H}3 regions of various IgG sub-types are known to one of skill in the art (see, e.g., U.S. Publication No. 2008/0248028; see, also, SEQ ID NOs: 9, 11, 13, and 15). Similarly, sequences of C_{L}, lambda or kappa, also are known (see, e.g., U.S. Publication No. 2008/0248028; see, also, SEQ ID NOS: 17-22).

[1216] In addition to recombinant production, TNFR1 antagonist polypeptides, TNFR2 agonist polypeptides, and TNFR1 antagonist/TNFR2 agonist polypeptide constructs, provided herein, can be produced by direct peptide synthesis using well-known solid-phase techniques. In vitro protein synthesis can be performed using manual techniques or by automation. Automated synthesis can be achieved, for example, using the Applied Biosystems 431A Peptide Synthesizer (Perkin Elmer; Foster City, Calif.), in accordance with the instructions provided by the manufacturer. Various fragments of a polypeptide can be chemically synthesized separately and combined using chemical methods.

[1217] 2. Generation of Mutant or Modified Nucleic Acids and Encoding Polypeptides

[1218] The modifications provided herein can be made by standard recombinant DNA techniques, such as are routine to one of skill in the art. Any method known in the art to effect mutation of any one or more amino acids in a target protein or polypeptide can be employed. Methods include standard site-directed mutagenesis (using, e.g., a kit, such as the QuikChange kit available from Stratagene) of encoding nucleic acid molecules, or solid-phase polypeptide synthesis methods.

[1219] 3. Vectors and Cells

[1220] For recombinant expression of one or more of the desired polypeptides, such as any TNFR1 antagonist or TNFR2 agonist polypeptides, or TNFR1 antagonist/TNFR2 agonist polypeptide constructs, described herein, the nucleic acid molecule containing all or a portion of the nucleotide sequence encoding the polypeptide can be inserted into an appropriate expression vector, i.e., a vector that contains the necessary elements for the transcription and translation of the inserted polypeptide coding sequence. Also provided are vectors that contain nucleic acid molecules encoding the polypeptides. After insertion of the nucleic acid molecule(s), the vectors typically are used to transform host cells, for example, to amplify the nucleic acid for replication and/or expression thereof. In such examples, a vector suitable for high level expression is used. In other cases, a vector is chosen that is compatible with display of the expressed polypeptide on the surface of the cell The choice of vector can depend on the desired application. Many expression vectors are available and known to those of skill in the art for the expression of anti-TNFR1 and anti-TNFR2 antibodies or portions thereof, such as antigen-binding fragments. Such selection is well within the level of skill of the skilled artisan. In general, expression vectors can include transcriptional promoters and optionally enhancers, translational signals, and transcriptional and translational termination signals. Expression vectors that are used for stable transformation typically have a selectable marker which allows for selection and maintenance of the transformed cells. In some cases, a high copy number origin of replication can be used to amplify the copy number of the vectors in the cells. Vectors also generally can contain additional nucleotide sequences operably linked to the ligated nucleic acid molecule (e.g., His tag, Flag tag). For applications with antibodies, vectors generally include sequences encoding the constant region. Thus, antibodies or portions thereof also can be expressed as protein fusions. For example, a fusion protein can be generated to add additional functionality to a polypeptide. Examples of fusion proteins include, but are not limited to, fusions of a signal sequence, an epitope tag such as for localization, e.g., a His₆ tag or a myc tag, or a tag for purification, such as a GST tag, and/or a sequence for directing protein secretion and/or membrane association. Fusion proteins herein also include fusions of the TNFR1 antagonist and/or the TNFR2 agonist to a modified Fc region, the hinge region of an IgG, and/or a peptide linker, such as a GS linker.

[1221] A variety of host-vector systems can be used to express the protein coding sequence. These include, but are not limited to, mammalian cell systems infected with virus (e.g., vaccinia virus, adenovirus, and other viruses); insect cell systems infected with virus (e.g., baculovirus); microorganisms, such as yeast, containing yeast vectors; and bacteria transformed with bacteriophage, DNA, plasmid DNA, or cosmid DNA. The choice between eukaryotic expression systems and bacterial systems depends upon the desired post-translational modifications, such as glycosylation. The expression elements of vectors vary in their strengths and specificities. Depending on the host-vector system used, any one of a number of suitable transcription and translation elements can be used.

[1222] Any methods known to those of skill in the art for the insertion of DNA fragments into a vector can be used to construct expression vectors containing a nucleic acid molecule encoding a polypeptide, such as, for example, an antibody fragment or TNFR1 antagonist, or TNFR2 agonist, provided herein, as well as appropriate transcriptional/translational control signals. These methods can include in vitro recombinant DNA and synthetic techniques, and in vivo recombinants (genetic recombination). The insertion into a cloning vector can, for example, be accomplished by ligating the DNA fragment into a cloning vector which has complementary cohesive termini. If the complementary restriction sites used to fragment the DNA are not present in the cloning vector, the ends of the DNA molecules can be enzymatically modified. Alternatively, any site desired can be produced by ligating nucleotide sequences (linkers) onto the DNA termini; these ligated linkers can contain specific chemically synthesized nucleic acids encoding restriction endonuclease recognition sequences.

[1223] For example, expression of the construct polypeptides, such as the TNFR1 antagonists, TNFR2 agonists and TNFR1 antagonist/TNFR2 agonist constructs herein, can be controlled by any promoter/enhancer known in the art. Suitable bacterial promoters are well-known in the art and described herein below. Other suitable promoters for mammalian cells, yeast cells and insect cells are well-known in the art and some are exemplified below. Selection of the promoter used to direct expression of a heterologous nucleic acid depends on the particular application. Promoters which can be used include, but are not limited to, eukaryotic expression vectors containing the SV40 early promoter (see, e.g., Benoist and Chambon (1981) Nature 290:304-310), the promoter contained in the 3′ long terminal repeat of Rous sarcoma virus (see, e.g., Yamamoto et al. (1980) Cell 22:787-797), the herpes thymidine kinase promoter (see, e.g., Wagner et al. (1981) Proc. Natl. Acad. Sci. U.S.A. 78:1441-1445), the regulatory sequences of the metallothionein gene (see, e.g., Brinster et al. (1982) Nature 296:39-42), and the cytomegalovirus (CMV) promoter; prokaryotic expression vectors such as the β-lactamase promoter (see, e.g., Jay et al. (1981) Proc. Natl. Acad. Sci. U.S.A. 78:5543), or the tac promoter (see, e.g., DeBoer et al. (1983) Proc. Natl. Acad. Sci. U.S.A. 80:21-25); see also “Useful Proteins from Recombinant Bacteria”: in Scientific American 242:79-94 (1980); plant expression vectors containing the nopaline synthetase promoter (see, e.g., Herrara-Estrella et al. (1984) Nature 303:209-213), the cauliflower mosaic virus 35S RNA promoter (see, e.g., Gardner et al. (1981) Nucleic Acids Res. 9(12):2871-2888), and the promoter of the photosynthetic enzyme ribulose bisphosphate carboxylase (see, e.g., Herrera-Estrella et al. (1984) Nature 310:115-120); promoter elements from yeast and other fungi such as the Gal4 promoter, the alcohol dehydrogenase promoter, the phosphoglycerol kinase promoter, the alkaline phosphatase promoter, and the following animal transcriptional control regions that exhibit tissue specificity and have been used in transgenic animals: elastase I gene control region, which is active in pancreatic acinar cells (see, e.g., Swift et al. (1984) Cell 38:639-646; Ornitz et al. (1986) Cold Spring Harbor Symp. Quant. Biol. 50:399-409; MacDonald (1987) Hepatology 7:425-515), insulin gene control region, which is active in pancreatic beta cells (see, e.g., Hanahan et al. (1985) Nature 315:115-122), immunoglobulin gene control region, which is active in lymphoid cells (see, e.g., Grosschedl et al. (1984) Cell 38:647-658; Adams et al. (1985) Nature 318:533-538; Alexander et al. (1987) Mol. Cell Biol. 7:1436-1444), mouse mammary tumor virus control region, which is active in testicular, breast, lymphoid and mast cells (see, e.g., Leder et al. (1986) Cell 45:485-495), albumin gene control region, which is active in liver (see, e.g., Pinckert et al. (1987) Genes and Devel. 1:268-276), alpha-fetoprotein gene control region, which is active in liver (see, e.g., Krumlauf et al. (1985) Mol. Cell. Biol. 5:1639-1648; Hammer et al. (1987) Science 235:53-58), alpha-1 antitrypsin gene control region, which is active in liver (see, e.g., Kelsey et al. (1987) Genes and Devel. 1:161-171), beta globin gene control region, which is active in myeloid cells (see, e.g., Magram et al. (1985) Nature 315:338-340; Kollias et al. (1986) Cell 46:89-94), myelin basic protein gene control region, which is active in oligodendrocyte cells of the brain (see, e.g., Readhead et al. (1987) Cell 48:703-712), myosin light chain-2 gene control region, which is active in skeletal muscle (see, e.g., Shani (1985) Nature 314:283-286), and gonadotrophic releasing hormone gene control region, which is active in gonadotrophs of the hypothalamus (see, e.g., Mason et al. (1986) Science 234:1372-1378).

[1224] Expression vectors typically contain a transcription unit or expression cassette that contains all the additional elements required for the expression of the construct or portion(s) thereof, in host cells. A typical expression cassette contains a promoter operably linked to the nucleic acid encoding the construct, such as an antibody fragment, domain, derivative or homolog thereof, or other polypeptide as described herein (e.g., TNF muteins and fusion proteins), and signals required for efficient polyadenylation of the transcript, ribosome binding sites and translation termination. Additional elements of the cassette can include enhancers. In addition, the cassette typically contains a transcription termination region downstream of the structural gene to provide for efficient termination. The termination region can be obtained from the same gene as the promoter sequence, or can be obtained from different genes. For example, a vectors include, a promoter operably linked to nucleic acids encoding a desired polypeptide, or a domain, fragment, derivative or homolog hereof, one or more origins of replication, and optionally, one or more selectable markers (e.g., an antibiotic resistance gene).

[1225] Expression systems can have markers that provide gene amplification, such as thymidine kinase and dihydrofolate reductase. Expression systems not involving gene amplification are also suitable, such as using a baculovirus vector in insect cells, with a nucleic acid sequence encoding a polypeptide under the direction of the polyhedron promoter or other strong baculovirus promoter.

[1226] For purposes herein, vectors are provided that contain a sequence of nucleotides that encode the Fc region of an IgG antibody, generally a modified Fc, operably linked to the nucleic acid encoding a TNFR1 antagonist or TNFR2 agonist polypeptide, and encoding a linker in between, such as an IgG hinge sequence and/or a short peptide linker, such as a GS linker, including glycine rich flexible linkers, such as (Gly₄Ser)ₙ, where n is a positive integer, such as 1-5 or more, and others of the linkers as described herein or known to those of skill in the art. The vector can include the sequence for one or all of a C_{H}1, C_{H}2, hinge, C_{H}3 or C_{H}4, and/or C_{L}. Generally, such as for expression of Fabs, the vector contains the sequence for a C_{H}1 or C_{L} (kappa or lambda light chains). For example, V_{H}-C_{H}1 and V_{L}-C_{L} sequences can be inserted into a suitable expression vector for the expression of Fab molecules. The sequences of constant regions or hinge regions are known to one of skill in the art (see. e.g., U.S. Publication No. 2008/0248028). Examples of such sequences are provided herein.

[1227] Typically, vectors can be plasmids, viral vectors, or others known in the art, used for expression of the polypeptides in vivo or in vitro. For example, the constructs provided herein, such nucleic acid encoding TNFR1 antagonist and TNFR2 agonist polypeptide constructs, are expressed in mammalian cells, including, for example, Chinese Hamster Ovary (CHO) cells.

[1228] Exemplary eukaryotic vectors include, for example, well known readily available vectors, such as pCMV (Agilent Technologies), pCDNA3.1 (Invitrogen (Thermo Fisher Scientific)), pCBL (from Creative BioLabs, see, e.g., FIG. 1). Other eukaryotic vectors, for example any containing regulatory elements from eukaryotic viruses, can be used as eukaryotic expression vectors. These include, for example, SV40 vectors, papilloma virus vectors, and vectors derived from Epstein-Bar virus. Exemplary eukaryotic vectors include, for example, pMSG, pAV009/A+, pMT010/A+, pMAMneo-5, baculovirus pDSCE, and any other vector allowing for the expression of proteins under the direction of the CMV promoter, SV40 early promoter, SV40 late promoter, metallothionein promoter, murine mammary tumor virus promoter, Rous sarcoma virus promoter, polyhedron promoter, or other promoters shown to be effective for expression in eukaryotes.

[1229] Viral vectors, such as adenovirus, retrovirus or vaccinia virus vectors, can be employed. In some examples, the vector is a defective or attenuated retroviral or other viral vector (see, e.g., U.S. Pat. No. 4,980,286). For example, a retroviral vector can be used (see, e.g., Miller et al. (1993) Meth. Enzymol. 217:581-599). These retroviral vectors have been modified to delete retroviral sequences that are not necessary for packaging of the viral genome and integration into host cell DNA. In some examples, viruses armed with a nucleic acid encoding a polypeptide herein can facilitate their replication and spread within a target tissue. The virus also can be a lytic virus or a non-lytic virus where the virus selectively replicates under a tissue specific promoter. As the viruses replicate, the co-expression of the polypeptide with viral genes will facilitate the spread of the virus in vivo.

[1230] For bacterial expression, vectors include the well-known and widely disseminated vectors pBR322, pUC, pSKF, pET23D, and fusion vectors, such as MBP (Sigma-Aldrich), GST (Sigma-Aldrich) and vectors containing LacZ. Exemplary plasmid vectors for transformation of E. coli cells, include, for example, the pQE expression vectors (available from Qiagen®, Valencia, Calif.; see also literature published by Qiagen® describing the system). pQE vectors have a phage T5 promoter (recognized by E. coli RNA polymerase) and a double lac operator repression module to provide tightly regulated, high-level expression of recombinant proteins in E. coli, a synthetic ribosomal binding site (RBS II) for efficient translation, a 6×His tag coding sequence, to and T1 transcriptional terminators, a ColE1 origin of replication, and a beta-lactamase gene for conferring ampicillin resistance. The pQE vectors permit placement of a 6×His tag at either the N- or C-terminus of the recombinant protein. Such plasmids include pQE 32, pQE 30, and pQE 31, which provide multiple cloning sites for all three reading frames and provide for the expression of N-terminally 6×His-tagged proteins. Other exemplary plasmid vectors for transformation of E. coli cells, include, for example, the pET expression vectors (see, e.g., U.S. Pat. No. 4,952,496; available from NOVAGEN, Madison, Wis.; see, also literature published by NOVAGEN describing the system). Such plasmids include pET 11a, which contains the T7lac promoter, the T7 terminator, the inducible E. coli lac operator, and the lac repressor gene; pET 12a-c, which contains the T7 promoter, the T7 terminator, and the E. coli ompT secretion signal; and pET 15b and pET19b (NOVAGEN, Madison, Wis.), which contain a His-Tag™ leader sequence for use in purification with a His column, and a thrombin cleavage site that permits cleavage following purification over the column, the T7-lac promoter region and the T7 terminator.

[1231] Cells containing the vectors also are provided. Generally, any cell type that can be engineered to express heterologous DNA and has a secretory pathway is suitable. The cells include eukaryotic and prokaryotic cells, and the vectors are any suitable for use therein. Generally, the cell is a cell that is capable of effecting glycosylation of the encoded protein. Prokaryotic and eukaryotic cells containing the vectors are provided. Such cells include bacterial cells, yeast cells, fungal cells, Archea, plant cells, insect cells and animal, particularly mammalian, cells. The cells are used to produce a polypeptide by growing the above-described cells under conditions whereby the encoded polypeptide is expressed by the cell, and recovering the expressed polypeptide. For purposes herein, for example, the polypeptide can be secreted into the medium.

[1232] A host cell strain can be chosen for its ability to modulate the expression of the inserted sequences or to process the expressed protein in the desired fashion. Such modifications of the polypeptide include, but are not limited to, acetylation, carboxylation, glycosylation, phosphorylation, lipidation and acylation. Post-translational processing can impact the folding and/or function of the polypeptide. Different host cells, such as, but not limited to, Chinese hamster ovary (CHO) cells, such as DG44, FreeStyle™ CHO-S cells (Invitrogen), DXB11, CHO-K1), HeLa, MCDK, HEK293 and WI38 cells, have specific cellular machinery and characteristic mechanisms for such post-translational activities, and can be chosen to ensure the correct modification and processing of the introduced protein. Generally, the choice of cell is one that is capable of introducing N-linked glycosylation into the expressed polypeptide. Hence, eukaryotic cells containing the vectors are provided. Exemplary of eukaryotic cells are mammalian Chinese Hamster Ovary (CHO) cells. For example, CHO cells deficient in dihydrofolate reductase (DHFR⁻), such as DG44 cells, are used to produce polypeptides provided herein.

[1233] 4. Expression

[1234] The polypeptide constructs provided herein, including TNFR1 antagonist constructs, TNFR2 agonist constructs, TNFR1 antagonist/TNFR2 agonist multi-specific constructs, and portions thereof, can be produced by any method known to those of skill in the art for protein production, including in vivo and in vitro methods, recombinant and synthetic and chemical methods. Desired proteins can be expressed in any organism suitable to produce the required amounts and forms of the proteins, such as for example, needed for administration and treatment. Expression hosts include prokaryotic and eukaryotic organisms such as E. coli, yeast, plants, insect cells, mammalian cells, including human cell lines and transgenic animals. Expression hosts can differ in their protein production levels as well as the types of post-translational modifications that are present on the expressed proteins. The choice of expression host can be made based on these and other factors, known to those of skill in the art; these include regulatory and safety considerations, production costs and the need and methods for purification. Purification methods, and methods for assembly of components, are well known to those of skill in the art.

[1235] Expression in eukaryotic hosts can include expression in yeasts, such as Saccharomyces cerevisiae and Pichia pastoris, insect cells, such as Drosophila cells and lepidopteran cells, plants and plant cells, such as tobacco, corn, rice, algae, and lemna. Eukaryotic cells for expression also include mammalian cells lines, such as Chinese hamster ovary (CHO) cells, human embryonic kidney (HEK293) cells, or baby hamster kidney (BHK) cells. Eukaryotic expression hosts also include production in transgenic animals, for example, including production in serum, milk and eggs.

[1236] Many expression vectors are available and known to those of skill in the art and can be used for expression of proteins. The choice of expression vector will be influenced by the choice of host expression system. In general, expression vectors can include transcriptional promoters and optionally enhancers, translational signals, and transcriptional and translational termination signals. Expression vectors that are used for stable transformation typically have a selectable marker which allows selection and maintenance of the transformed cells. In some cases, an origin of replication can be used to amplify the copy number of the vectors in the cells.

[1237] The TNFR1 antagonists, TNFR2 agonists and bi-specific TNFR1 antagonist/TNFR2 agonist constructs herein also can be expressed as protein fusions. For example, a fusion protein can be generated to add additional functionality to a polypeptide. Examples of fusion proteins include, but are not limited to, fusions of a signal sequence, a tag such as for localization, e.g. a his₆ tag or a myc tag, or a tag for purification, for example, a GST fusion, and a sequence for directing protein secretion and/or membrane association. Fusion proteins also include fusions with an Fc region of an IgG, and a linker, such as a hinge sequence of an IgG, and/or a glycine-serine (GS) peptide linker. Alternatively, in some embodiments, the TNFR1 antagonists, TNFR2 agonists and bi-specific TNFR1 antagonist/TNFR2 agonist constructs herein also can fused to serum albumin.

[1238] For long-term, high-yield production of recombinant proteins, stable expression is desired. For example, cell lines that stably express a polypeptide can be transformed using expression vectors that contain viral origins of replication or endogenous expression elements and a selectable marker gene. Following the introduction of the vector, cells can be allowed to grow for 1-2 days in an enriched media before they are switched to selective media. The purpose of the selectable marker is to confer resistance to selection, and its presence allows growth and recovery of cells that successfully express the introduced sequences. Resistant cells of stably transformed cells can be proliferated using tissue culture techniques appropriate to the cell types.

[1239] Any number of selection systems can be used to recover transformed cell lines. These include, but are not limited to, the herpes simplex virus (HSV) thymidine kinase (TK) (see, e.g., Wigler et al., (1977) Cell 11:223-232) and adenine phosphoribosyltransferase (APRT) (see, e.g., Lowy, I. et al. (1980) Cell, 22:817-23) genes, which can be employed in TK⁻ or APRT⁻ cells, respectively. Also, antimetabolite, antibiotic or herbicide resistance can be used as the basis for selection. For example, dihydrofolate reductase (DHFR), which confers resistance to methotrexate (see, e.g., Wigler et al. (1980) Proc. Natl. Acad. Sci. U.S.A. 77:3567-70); npt, which confers resistance to the aminoglycosides neomycin and G-418 (see, e.g., Colbere-Garapin et al. (1981) J. Mol. Biol. 150:1-14); and als or pat, which confer resistance to chlorsulfuron and phosphinothricin acetyltransferase, respectively, can be used. Additional selectable genes have been described, for example, trpB, which allows cells to utilize indole in place of tryptophan, or hisD, which allows cells to utilize histinol in place of histidine (see, e.g., Hartman, S. C. and R. C. Mulligan (1988) Proc. Natl. Acad. Sci. U.S.A. 85:8047-8051). Visible markers, such as, but not limited to, anthocyanins, beta glucuronidase and its substrate, GUS, and luciferase and its substrate luciferin, also can be used to identify transformants and also to quantify the amount of transient or stable protein expression attributable to a particular vector system (see, e.g., Rhodes et al. (1995) Methods Mol. Biol. 55:121-131).

[1240] a. Prokaryotic Cells

[1241] Prokaryotes, especially E. coli, provide a system for producing large amounts of proteins. Prokaryotic expression systems generally are used for production of products that are not glycosylated. Transformation of E. coli protocols are well-known to those of skill in the art. Expression vectors for E. coli can contain inducible promoters; such promoters are useful for inducing high levels of protein expression and for expressing proteins that exhibit some toxicity to the host cells. Examples of inducible promoters include, for example, the lac promoter, the trp promoter, the hybrid tac promoter, the T7 and SP6 RNA promoters, and the temperature regulated λPL promoter.

[1242] Polypeptides and fusion proteins constructs provided herein, such as any provided herein, can be expressed in the cytoplasmic environment of E. coli. The cytoplasm is a reducing environment, and for some molecules, this can result in the formation of insoluble inclusion bodies. Reducing agents, such as dithiothreitol and β-mercaptoethanol, and denaturants, such as guanidine-HCl and urea, can be used to resolubilize the proteins. An alternative approach is the expression of proteins in the periplasmic space of bacteria which provides an oxidizing environment and chaperonin-like and disulfide isomerases, and can lead to the production of soluble protein. Typically, a leader sequence is fused to the protein to be expressed, which directs the protein to the periplasm. The leader is then removed by signal peptidases inside the periplasm. Exemplary pathways to translocate expressed proteins into the periplasm are the Sec pathway, the SRP pathway and the TAT pathway. Examples of periplasmic-targeting leader sequences include the pelB leader from the pectate lyase gene, the StII leader sequence, and the DsbA leader sequence, and the leader derived from the alkaline phosphatase gene. In some cases, periplasmic expression allows leakage of the expressed protein into the culture medium. The secretion of proteins allows for quick and simple purification from the culture supernatant. Proteins that are not secreted can be obtained from the periplasm by osmotic lysis. Similar to cytoplasmic expression, in some cases, proteins can become insoluble, and denaturants and reducing agents can be used to facilitate solubilization and refolding. The temperature of induction and growth also can influence expression levels and solubility; typically temperatures between 25° C. and 37° C. are used. Typically, bacteria produce aglycosylated proteins. Thus, if proteins require glycosylation for function, glycosylation can be added in vitro after purification from host cells.

[1243] b. Yeast Cells

[1244] Yeasts, such as Saccharomyces cerevisiae, Schizosaccharomyces pombe, Yarrowia lipolytica, Kluyveromyces lactis, and Pichia pastoris, are well-known expression hosts that can be used for the production of proteins, such as any described herein. Yeast can be transformed with episomal replicating vectors or by stable chromosomal integration by homologous recombination. Typically, inducible promoters are used to regulate gene expression. Examples of such promoters include GAL1, GAL7, and GAL5, and metallothionein promoters, such as CUP1, AOX1 or other Pichia or other yeast promoters. Expression vectors often include a selectable marker such as LEU2, TRP1, HIS3 and URA3, for selection and maintenance of the transformed DNA. Proteins expressed in yeast are often soluble. Co-expression with chaperonins, such as Bip and protein disulfide isomerase, can improve expression levels and solubility. Additionally, proteins expressed in yeast can be directed for secretion using secretion signal peptide fusions, such as the yeast mating type alpha-factor secretion signal from Saccharomyces cerevisiae, and fusions with yeast cell surface proteins, such as the Aga2p mating adhesion receptor, or the Arxula adeninivorans glucoamylase. A protease cleavage site, such as for the Kex-2 protease, can be engineered to remove the fused sequences from the expressed polypeptides as they exit the secretion pathway. Yeast also is capable of glycosylation at Asn-X-Ser/Thr motifs.

[1245] c. Insects and Insect Cells

[1246] Insect cells, particularly using baculovirus expression, are useful for expressing polypeptides, including antibodies or fragments thereof. Insect cells express high levels of protein and are capable of most of the post-translational modifications used by higher eukaryotes. Baculovirus have a restrictive host range which improves the safety and reduces regulatory concerns of eukaryotic expression. Typically, expression vectors use a promoter for high level expression, such as the polyhedrin promoter and p10 promoter of baculovirus. Baculovirus systems include baculoviruses, such as Autographa californica nuclear polyhedrosis virus (AcNPV), and the Bombyx mori nuclear polyhedrosis virus (BmNPV), and an insect cell line, such as Sf9 derived from Spodoptera frugiperda, TN derived from Trichoplusia ni, A7S derived from Pseudaletia unipuncta, and DpN1 derived from Danaus plexippus. For high-level expression, the nucleotide sequence of the molecule to be expressed is fused immediately downstream of the polyhedrin initiation codon of the virus. To generate baculovirus recombinants capable of expressing human antibodies, a dual-expression transfer, such as pAcUW51 (PharMingen) can be used. Mammalian secretion signals are accurately processed in insect cells and can be used to secrete the expressed protein into the culture medium. The cell lines Pseudaletia unipuncta (A7S) and Danaus plexippus (DpN1) produce proteins with glycosylation patterns similar to mammalian cell systems. Exemplary insect cells are those that have been altered to reduce immunogenicity, including those with “mammalianized” baculovirus expression vectors and those lacking the enzyme FT3.

[1247] An alternative expression system in insect cells is the use of stably transformed cells. Cell lines, such as the Schneider 2 (S2) and Kc cells (Drosophila melanogaster), and C7 cells (Aedes albopictus), can be used for expression. The Drosophila metallothionein promoter can be used to induce high levels of expression in the presence of heavy metal induction with cadmium or copper. The baculovirus immediate early gene promoter IE1 can be used to induce consistent levels of expression. Typical expression vectors include the pIE1-3 and pI31-4 transfer vectors (Novagen). Expression vectors are typically maintained by the use of selectable markers, such as neomycin and hygromycin.

[1248] d. Mammalian Expression Cells

[1249] Mammalian expression systems can be used to express polypeptides, including the constructs herein, including TNFR1 antagonists, TNFR2 agonists, bi-specific TNFR1 antagonist/TNFR2 agonist constructs, and fusions thereof, provided herein. Expression constructs can be transferred to mammalian cells by viral infection, such as with adenovirus, or by direct DNA transfer, such as by using liposomes, calcium phosphate and DEAE-dextran, and by physical means, such as electroporation and microinjection. Expression vectors for mammalian cells typically include an mRNA cap site, a TATA box, a translational initiation sequence (Kozak consensus sequence) and polyadenylation elements. Internal ribosomal entry site (IRES) elements also can be added to permit bicistronic expression with another gene, such as a selectable marker. Such vectors often include transcriptional promoter-enhancers for high-level expression, such as, for example, the SV40 promoter-enhancer, the human cytomegalovirus (CMV) promoter, and the long terminal repeat of Rous sarcoma virus (RSV). These promoter-enhancers are active in many cell types. Tissue and cell-type promoters and enhancer regions also can be used for expression. Exemplary promoter/enhancer regions include, but are not limited to, those from genes such as elastase I, insulin, immunoglobulin, mouse mammary tumor virus, albumin, alpha-fetoprotein, alpha-1 antitrypsin, beta-globin, myelin basic protein, myosin light chain-2, and gonadotropic releasing hormone gene control.

[1250] Selectable markers can be used to select for and maintain cells with the expression construct. Examples of selectable marker genes include, but are not limited to, hygromycin B phosphotransferase, adenosine deaminase, xanthine-guanine phosphoribosyltransferase, aminoglycoside phosphotransferase, dihydrofolate reductase (DHFR), and thymidine kinase (TK). For example, expression can be performed in the presence of methotrexate to select for only those cells expressing the DHFR gene. Modified anti-TNFR antibodies and antigen-binding fragments thereof can be produced, for example, using a NEO^{R}/G418 system, a dihydrofolate reductase (DHFR) system or a glutamine synthetase (GS) system. The GS system uses joint expression vectors, such as pEE12/pEE6, to express both heavy chain and light chain. Fusion with cell surface signaling molecules, such as TCR-ζ and Fc_{ε}RI-γ, can direct expression of the proteins in an active state on the cell surface.

[1251] Many cell lines are available for mammalian expression, including mouse, rat, human, monkey, chicken and hamster cells. Exemplary cell lines include, but are not limited to, BHK (e.g., BHK-21 cells), 293-F, CHO, CHO Express (CHOX; ExcellGene), Balb/3T3, HeLa, MT2, mouse NS0 (non-secreting), and other myeloma cell lines, hybridoma and heterohybridoma cell lines, lymphocytes, fibroblasts, Sp2/0, COS, NIH3T3, HEK293, 293S, 2B8, and HKB cells. Cell lines that are adapted to serum-free media also are available, which facilitates purification of secreted proteins from the cell culture media. Examples include CHO-S cells (Invitrogen®, Carlsbad, Calif., cat #11619-012) and the serum free EBNA-1 cell line (see, e.g., Pham et al. (2003) Biotechnol. Bioeng. 84:332-342). Cell lines that are adapted for growth in special mediums that are optimized for maximal expression also are available. For example, DG44 CHO cells are adapted to grow in suspension culture in a chemically defined, animal product-free medium.

[1252] e. Plants

[1253] Transgenic plant cells and plants can be used to express polypeptides and proteins, such as any described herein. Expression constructs are typically transferred to plants using direct DNA transfer, such as by microprojectile bombardment and PEG-mediated transfer into protoplasts, and with Agrobacterium-mediated transformation. Expression vectors can include promoter and enhancer sequences, transcriptional termination elements, and translational control elements. Expression vectors and transformation techniques are usually divided between dicot hosts, such as Arabidopsis and tobacco, and monocot hosts, such as corn and rice. Examples of plant promoters used for expression include, for example, the cauliflower mosaic virus promoter (CaMV 35S), the nopaline synthase promoter, the ribose bisphosphate carboxylase promoter, and the ubiquitin (e.g., maize ubiquitin-1 (ubi-1)) and UBQ3 promoters. Selectable markers, such as hygromycin, phosphomannose isomerase and neomycin phosphotransferase, are often used to facilitate selection and maintenance of transformed cells. Transformed plant cells can be maintained in culture as cells, aggregates (callus tissue) or regenerated into whole plants. Transgenic plant cells also can include algae engineered to produce polypeptides. Because plants have different glycosylation patterns than mammalian cells, this can influence the choice of protein produced in these hosts.

[1254] 5. Purification

[1255] Host cells transformed with a nucleic acid encoding polypeptide constructs provided herein can be cultured under conditions suitable for the expression and recovery of the encoded protein from cell culture. The protein produced by a recombinant cell is generally secreted, but can be contained intracellularly, depending on the sequence and/or the vector used. As understood by those of skill in the art, expression vectors containing nucleic acid molecules encoding polypeptides provided herein can be designed with signal sequences that facilitate direct secretion of expressed polypeptides through prokaryotic or eukaryotic cell membranes.

[1256] Methods for purification of polypeptides from host cells depend on the chosen host cells and expression systems. For secreted molecules, proteins are generally purified from the culture media after removing the cells. For intracellular expression, cells can be lysed, and the proteins can be purified from the extract. When transgenic organisms, such as transgenic plants and animals, are used for expression, tissues or organs can be used as starting material to make a lysed cell extract. Additionally, transgenic animal production can include the production of polypeptides in milk or eggs, which can be collected, and if necessary, the proteins can be extracted and further purified using standard methods in the art.

[1257] Polypeptides, such as the TNFR1 antagonist constructs, TNFR2 agonist constructs, TNFR1 antagonist/TNFR2 agonist bi-specific constructs, and other constructs provided herein, and components thereof, can be purified using protein purification techniques known to those of skill in the art. These include, but are not limited to, limited to, SDS-PAGE, size fractionation and size exclusion chromatography, ammonium sulfate precipitation, chelate chromatography, column chromatography, HPLC, dialysis, and ionic exchange chromatography, such as anion exchange, and combinations thereof. Affinity purification techniques also can be used. The constructs herein can be purified using methods developed for purification of antibodies and antibody fragments. Exemplary of a method to purify antibodies and antibody fragments are methods that include column chromatography, where a solid support column material is linked to Protein G, a cell surface-associated protein from Streptococcus, that binds immunoglobulins with high affinity. Antibodies and antibody fragments also can be purified by methods that include protein A chromatography, in which protein A, a cell surface-associated protein from Staphylococcus aureus, which binds immunoglobulins, such as IgGs, with high affinity, is bound to a solid support column. Other immunoglobulin-binding bacterial proteins that can be used to purify the antibodies and antibody fragments, include Protein A/G, a recombinant fusion protein that combines the IgG binding domains of Protein A and Protein G; and Protein L, a surface protein from Peptostreptococcus (see, e.g., Bjorck (1988) J. Immunol. 140(4):1194-1197; Kastern et al. (1992) J. Biol. Chem. 267(18):12820-12825; Eliasson et al. (1988) J. Biol. Chem. 263:4323-4327). The constructs are substantially pure, which is typically at least or at least about 90%, 91%, 92%, 93%, 94%, 95%, 96%, 97%, 98% or 99% purity. Purity can be assessed by standard methods, such as by SDS-PAGE and Coomassie blue staining.

[1258] When antibodies and fragments thereof and related polypeptides are expressed by transformed bacteria in large amounts, typically after promoter induction, although expression can be constitutive, the polypeptides can form insoluble aggregates. Protocols for purification of polypeptide inclusion bodies are known to one of skill in the art. For example, in one method, a cell suspension is centrifuged to pellet the inclusion bodies, and the pellet containing the inclusion bodies is re-suspended in a buffer, such as, for example, 20 mM Tris-HCL (pH 7.2), 1 mM EDTA, 150 mM NaCl and 2% Triton-X 100, a non-ionic detergent, which does not harm the inclusion bodies, but dissolved contaminants. The wash step can be repeated to remove as much cellular debris as possible. The remaining pellet of inclusion bodies is re-suspended in an appropriate buffer, such as 20 mM sodium phosphate, pH 6.8, 150 mM NaCl. Other appropriate buffers, as well as alternative purification protocols, are known or can be developed by one of skill in the art.

[1259] Other methods for purifying, antibodies and fragments thereof, and the constructs provided herein, can be used or developed. They can be purified from bacterial periplasm. For polypeptides exported into the periplasm of bacteria in which the polypeptide is produced, the periplasmic fraction of the bacteria can be isolated by cold osmotic shock, in addition to other methods known to those of skill in the art. For example, in one method, to isolate recombinant polypeptides from the periplasm, the bacterial cells are centrifuged to form a pellet. The pellet is re-suspended in a buffer containing 20% sucrose. To lyse the cells, the bacteria are centrifuged and the pellet is re-suspended in ice-cold 5 mM MgSO₄ and kept in an ice bath for approximately 10 minutes. The cell suspension is centrifuged and the supernatant is decanted and saved. The recombinant polypeptides present in the supernatant can be separated from the host proteins by standard separation techniques that are well-known to those of skill in the art. These methods include, but are not limited to, the following steps: solubility fractionation, size differential filtration, and column chromatography.

[1260] Expression constructs also can be engineered to include a nucleic acid encoding an affinity tag, for example for detection or purification of the expressed product, operatively linked, upon expression to the encoded polypeptide. Affinity tags, include, for example, a Small Ubiquitin-like Modifier (SUMO) tag, a myc epitope, a GST fusion or His₆, for affinity purification with SUMO, myc antibody, glutathione resin and Ni-resin, respectively. Nucleic acid encoding such tags can be joined to the nucleic acid encoding the polypeptide constructs provided herein. The tags can facilitate purification and/or detection of soluble proteins. For example, a TNFR1 antagonist polypeptide construct or portion thereof can be expressed as a recombinant protein with one or more additional polypeptide domains added to facilitate protein purification. Purification facilitating domains include, but are not limited to, metal chelating peptides, such as histidine-tryptophan modules that allow purification on immobilized metals, protein A domains that allow purification on immobilized immunoglobulin, and the domain utilized in the FLAGS extension/affinity purification system (Immunex Corp., Seattle, Wash.). The inclusion of nucleic acid encoding a cleavable linker sequence, such as a Factor Xa cleavable recognize site (Ile-Glu-Gly-Arg, engineered to include a Nru I restrictions site, see, e.g., EP 92115607A) or enterokinase (Invitrogen (Thermo Fisher Scientific), San Diego, Calif.), between the purification domain and an encoded expressed polypeptide, facilitate purification. An exemplary expression vector encodes for expression of a fusion protein containing a TNFR1 antagonist and/or a TNFR2 agonist polypeptide and an enterokinase cleavage site. The Small Ubiquitin-like Modifier (SUMO) tag facilitates purification on immobilized metal ion affinity chromatography (IMIAC), and the enterokinase cleavage site provides a cleavage site for purifying the polypeptide from the fusion protein.

[1261] Purity can be assessed by any method known in the art, including gel electrophoresis, orthogonal HPLC methods, staining and spectrophotometric techniques. The expressed and purified polypeptide can be analyzed using any assay or method known to one of skill in the art, for example, any described herein. These include assays based on the physical and/or functional properties of the polypeptide, including, but not limited to, analysis by gel electrophoresis, immunoassays, binding assays, and assays of TNF-mediated TNFR1 and/or TNFR2 activity.

[1262] 6. Additional Modifications

[1263] The modified TNFR1 antagonist constructs, TNFR2 agonist constructs, bi-specific TNFR1 antagonist/TNFR2 agonist constructs, and other constructs, and components thereof provided, as described above, include components (activity modifiers) that alter pharmacological properties, including pharmacokinetic and pharmacodynamic properties. The portions of the constructs, such as TNFR1 inhibitor polypeptides and small molecules, and TNFR2 agonist polypeptides and small molecules, can be conjugated to a polymer or polymeric moiety, such as, but not limited to, a polyethylene glycol (PEG) moiety or dextran, or to human serum albumin (HSA), or can be sialylated to reduce immunogenicity and/or to increase half-life in serum and other body fluids. The polypeptides also can be linked to a purification tag, such as a His tag or a SUMO sequence. Additional modifications include, for example, glycosylation, carboxylation, hydroxylation, phosphorylation, or other known modifications. Glycosylation can be incorporated in vivo, using an appropriate expression system, such as a mammalian expression system, in vitro, or via a combination of in vivo and in vitro methods in which, for example, the polypeptide is expressed in prokaryotic cells and is further modified in vitro using enzymatic transglycosylation. Other modifications can be made in vitro or, for example, by producing the modified polypeptide in a suitable host that produces such modifications.

[1264] These modifications or activity modifiers and modifications are effected and selected so that the modified polypeptide incorporates the functionality of the modification and retains at least a portion, generally at least 50%, 60%, 70%, 80%, 90%, or 95% activity compared with a non-fused or unmodified polypeptide, including 96%, 97%, 98%, 99% or greater activity compared with a non-fusion or unmodified polypeptide. For example, TNFR1 antagonist constructs retain the ability to inhibit TNF-mediated signaling via TNFR1.

[1265] Linkage of a polypeptide such as a TNFR1 antagonist or TNFR2 agonist, with another polypeptide, can be effected directly or indirectly via a linker. In one example, linkage can be by chemical linkage, such as via heterobifunctional agents, or thiol linkages, or other such linkages. Fusion also can be effected by recombinant expression. Fusion of a polypeptide, such as a TNFR1 antagonist or TNFR2 agonist, to another polypeptide, can be to the N- or C-terminus of the TNFR1 antagonist or TNFR2 agonist polypeptide. Non-limiting examples of polypeptides that can be used in fusion proteins with a TNFR1 antagonist or TNFR2 agonist polypeptide provided herein include, for example, a GST (glutathione S-transferase) polypeptide, an Fc domain from immunoglobulin G, albumin, a heterologous signal sequence, and combinations thereof.

[1266] The encoded constructs can be produced by standard recombinant techniques. For example, DNA fragments encoding the different polypeptide portions can be ligated together in-frame, in accordance with conventional techniques, e.g., by employing blunt-ended or stagger-ended termini for ligation, restriction enzyme digestion to provide for appropriate termini, filling-in of cohesive ends as appropriate, alkaline phosphatase treatment to avoid undesirable joining, and enzymatic ligation. The fusion gene can be synthesized by conventional techniques, including automated DNA synthesizers. Alternatively, PCR amplification of gene fragments can be carried out using anchor primers that give rise to complementary overhangs between two consecutive gene fragments that subsequently can be annealed and re-amplified to generate a chimeric gene. Many expression vectors are commercially available that already encode a fusion moiety (e.g., a GST polypeptide). A polypeptide-encoding nucleic acid can be cloned into such an expression vector such that the fusion moiety is linked in-frame to the TNFR1 antagonist, TNFR2 agonist, and multi-specific, such as bi-specific, constructs provided herein.

[1267] a. PEGylation

[1268] Polyethylene glycol (PEG) is used in biomaterials, biotechnology and medicine; it is a biocompatible, nontoxic, water-soluble polymer that generally is non-immunogenic. In the area of drug delivery, PEG derivatives are used in covalent attachment to proteins (i.e., “PEGylation”), to reduce immunogenicity, proteolysis, and kidney clearance, and to increase serum half-life, and enhance solubility (see, e.g., Zalipsky (1995) Adv. Drug Del. Rev. 16:157-182). PEG has been attached to low molecular weight, relatively hydrophobic drugs to enhance solubility, reduce toxicity and alter biodistribution. Conjugation to linear or branched-chain PEG moieties increases the molecular mass and hydrodynamic radius of the polypeptide, and decreases the rate of glomerular filtration by the kidneys. Typically, PEGylated drugs are administered, such as by injection, as solutions. In the constructs herein, PEGylation moieties and other such polymers can be part of the linker portions of the constructs.

[1269] A related application is the synthesis of cross-linked degradable PEG networks or formulations for use in drug delivery, since much of the same chemistry used in the design of degradable, soluble drug carriers also can be used in the design of degradable gels (see, e.g., Sawhney et al. (1993) Macromolecules 26:581-587). Intermacromolecular complexes can be formed by mixing solutions of two complementary polymers. Such complexes are stabilized by electrostatic interactions (polyanion-polycation) and/or hydrogen bonds (polyacid-polybase) between the polymers involved, and/or by hydrophobic interactions between the polymers in a medium (see, e.g., Krupers et al. (1996) Eur. Polym. J. 32:785-790). For example, mixing solutions of polyacrylic acid (PAAc) and polyethylene oxide (PEO) under the proper conditions results in the formation of complexes based mostly on hydrogen bonding. Dissociation of these complexes at physiologic conditions has been used for delivery of free (i.e., non-PEGylated) drugs. Complexes of complementary polymers have been formed from homopolymers and copolymers.

[1270] Numerous reagents for PEGylation are known, as are PEGylated therapeutic proteins. Such reagents include, but are not limited to, N-hydroxysuccinimidyl (NHS) activated PEG, succinimidyl mPEG, mPEG₂-N-hydroxysuccinimide, mPEG succinimidyl alpha-methylbutanoate, mPEG succinimidyl propionate, mPEG succinimidyl butanoate, mPEG carboxymethyl 3-hydroxybutanoic acid succinimidyl ester, homobifunctional PEG-succinimidyl propionate, homobifunctional PEG propionaldehyde, homobifunctional PEG butyraldehyde, PEG maleimide, PEG hydrazide, p-nitrophenyl-carbonate PEG, mPEG-benzotriazole carbonate, propionaldehyde PEG, mPEG butryaldehyde, branched mPEG₂ butyraldehyde, mPEG acetyl, mPEG piperidone, mPEG methylketone, mPEG “linkerless” maleimide, mPEG vinyl sulfone, mPEG thiol, mPEG orthopyridylthioester, mPEG orthopyridyl disulfide, Fmoc-PEG-NHS, Boc-PEG-NHS, vinylsulfone PEG-NHS, acrylate PEG-NHS, fluorescein PEG-NHS, and biotin PEG-NHS (see, e.g., Veronese et al. (1997) J. Bioactive Compatible Polymers 12:197-207; and numerous U.S. and worldwide patents). In one example, the polyethylene glycol has a molecular weight ranging from about 3 kDa to about 50 kDa, and typically from about 5 kDa to about 30 kDa. Covalent attachment of the PEG to the drug (known as “PEGylation”) can be accomplished by known chemical synthesis techniques. For example, the PEGylation of protein can be accomplished by reacting NHS-activated PEG with the protein under suitable reaction conditions.

[1271] While numerous reactions have been described for PEGylation, those that are most generally applicable for proteins confer directionality, use mild reaction conditions, and do not necessitate extensive downstream processing to remove toxic catalysts or bi-products. For instance, monomethoxy PEG (mPEG) has only one reactive terminal hydroxyl, and thus, its use limits some of the heterogeneity of the resulting PEG-protein product mixture. Activation of the hydroxyl group at the end of the polymer opposite to the terminal methoxy group is generally necessary to accomplish efficient protein PEGylation, with the aim being to make the derivatized PEG more susceptible to nucleophilic attack. The attacking nucleophile is usually the epsilon-amino group of a lysyl residue, but other amines also can react (e.g., the N-terminal alpha-amine or the ring amines of histidine), if local conditions are favorable. A more directed attachment is possible in proteins containing a single lysine or cysteine. The latter residue can be targeted by PEG-maleimide for thiol-specific modification. Alternatively, PEG hydrazide can be reacted with a periodate oxidized protein and reduced in the presence of NaCNBH₃. More specifically, PEGylated CMP sugars can be reacted with a protein in the presence of appropriate glycosyl-transferases. One technique is the “PEGylation” technique where a number of polymeric molecules are coupled to the polypeptide in question. When using this technique, the immune system has difficulties in recognizing the epitopes on the polypeptide's surface that are responsible for the formation of antibodies, thereby reducing the immune response. For polypeptides introduced directly into the circulatory system of the human body to give a particular physiological effect (i.e., pharmaceuticals), the typical potential immune response is an IgG and/or IgM response, while polypeptides which are inhaled through the respiratory system (i.e., industrial polypeptides) potentially can cause an IgE response (i.e., allergic response). One of the theories explaining the reduced immune response is that the polymeric molecule(s) shield(s) epitope(s) on the surface of the polypeptide that are responsible for the immune response leading to antibody formation. Another theory, or at least a partial factor, is that the heavier the conjugate is, the more reduced the immune response.

[1272] For example, PEGylate polypeptide constructs and polypeptide components provided herein, PEG moieties are conjugated, via covalent attachment, to the polypeptides. Techniques for PEGylation include, but are not limited to, the use of specialized linkers and coupling chemistries (see, e.g., Harris (2002) Adv. Drug Deliv. Rev. 54:459-476), attachment of multiple PEG moieties to a single conjugation site (such as via use of branched PEGs; see, e.g., Veronese et al., (2002) Bioorg. Med. Chem. Lett. 12:177-180), site-specific PEGylation and/or mono-PEGylation (see, e.g., Chapman et al. (1999) Nature Biotech. 17:780-783), and site-directed enzymatic PEGylation (see, e.g., Sato (2002) Adv. Drug Deliv. Rev. 54:487-504). Methods and techniques described in the art can produce proteins having 1, 2, 3, 4, 5, 6, 7, 8, 9, 10, or more than 10, PEG or PEG derivatives attached to a single protein molecule (see, e.g., U.S. Patent Publication No. 2006/0104968).

[1273] b. Albumination

[1274] The polypeptides provided herein, such as the TNFR1 antagonist constructs, TNFR2 agonist constructs, and multi-specific TNFR1 antagonist/TNFR2 agonist constructs, can be fused to albumin (i.e., “albuminated”), for human therapeutics, to human serum albumin (HSA), to increase the half-life, stability, bioavailability, and distribution, and/or to improve the pharmacological properties, such as pharmacokinetics, of the polypeptides. Numerous products linked to human serum albumin (HSA) are approved for use as therapeutics, including for use as cancer therapeutics and for the treatment of type 2 diabetes (see, e.g., AlQahtani et al. (2019) Biomed and Pharmacotherapy 113:108750; Roscoe et al. (2018) Mol. Pharmaceutics 151:15046-5047; Strohl, W. R. (2015) BioDrugs 4:215-239). In some examples, the mature HSA protein, lacking the signal sequence and activation sequence, is fused to a protein of interest. In some examples, serum albumin, such as human serum albumin (HSA), is conjugated to the polypeptide. An exemplary HSA protein is set forth in SEQ ID NO:35.

[1275] Fusions with HSA are provided herein. These include fusion with HSA to the N- or C-terminus of the TNFR1 antagonist (e.g., dAbs, scFvs, Fabs or other antigen-binding fragments, as provided herein), or the TNFR2 agonists (e.g., TNF mutein), generally, via a short peptide linker, such as, but not limited to, a glycine-serine (GS) linker, such as (GSGS)ₙ or (GGGGS)ₙ, where n=1-5 or 6. Exemplary TNFR1 antagonist-HSA fusions are set forth in SEQ ID NOs: 709, 713, 717, 721, and 725.

[1276] c. Purification Tags

[1277] In some examples, the TNFR1 antagonist constructs, TNFR2 agonist constructs, multi-specific, such as bi-specific, TNFR1 antagonist/TNFR2 agonist constructs and fusion proteins, provided herein, can contain a tag for purification of the product. Exemplary tags for purification are described elsewhere herein. For example, exemplary polypeptides herein can contain a SUMO or His sequence for purification. Generally, the tags are cleavable tags.

[1278] The polypeptide constructs, including fusion proteins, provided herein can include a His purification tag, such as a 6×His tag. His-tagged polypeptides optionally can contain a fusion partner, and/or a signal for expression and secretion. For example, the exemplary His-polypeptide fusion proteins can contain one or more of a human immunoglobulin light chain kappa (κ) leader signal peptide sequence (SEQ ID NO:835), a 6×His tag (SEQ ID NO:836), a SUMO sequence (SEQ ID NO:837), and HSA (SEQ ID NO:35). In another example, the exemplary His tagged-polypeptide fusion proteins can contain the human immunoglobulin light chain kappa (κ) leader signal peptide sequence (SEQ ID NO:835), a 6×His tag (SEQ ID NO:836), a SUMO sequence (SEQ ID NO:837), and an IgG Fc (see, e.g., SEQ ID NOs: 10, 12, 14, 16, 27, and 30).

[1279] In some embodiments, the polypeptides and fusion proteins provided herein can include a His tag and/or SUMO sequences for accumulation in inclusion bodies. For example, the His-SUMO sequence set forth in SEQ ID NO:838, can be linked to any of the polypeptides or fusion proteins provided herein. His-SUMO tagged polypeptides optionally can contain a fusion partner, and/or a signal for expression and secretion. For example, the His-SUMO-polypeptide fusion proteins can contain the human immunoglobulin light chain kappa (κ) leader signal peptide sequence (SEQ ID NO:835), a 6×His tag (SEQ ID NO:836), a SUMO sequence (SEQ ID NO:837), and HSA (SEQ ID NO:35). In another example, the exemplary His-SUMO-polypeptide fusion proteins can contain the human immunoglobulin light chain kappa (κ) leader signal peptide sequence (SEQ ID NO:835), a 6×His tag (SEQ ID NO:836), a SUMO sequence (SEQ ID NO:837), and an IgG Fc (see, e.g., SEQ ID NOs: 10, 12, 14, 16, 27, and 30).

[1280] 7. Nucleic Acid Molecules and Gene Therapy

[1281] Nucleic acid molecules encoding polypeptide constructs that are fusion proteins that are provided herein can be used for gene therapy, such as, for expression in gene therapy vectors or for administration as DNA or RNA constructs. Among these, some of the TNFR1 antagonist, TNFR2 agonist, and bi-specific TNFR1 antagonist/TNFR2 agonist constructs that are provided herein are provided as fusion proteins. Nucleic acid molecules encoding these constructs, as well as vectors and other delivery vehicles, are provided herein. The nucleic acid molecules can encode polypeptides having at least 80%, 85%, 90%, 91%, 92%, 93%, 94%, 95%, 96%, 97%, 98%, or 99% sequence identity to any polypeptide or construct provided herein. In another embodiment, a nucleic acid molecule can include those with degenerate codon sequences encoding any of the polypeptides or constructs provided herein.

[1282] The nucleic acids molecules for use for in gene therapy are operably-linked to regulatory sequences of nucleic acids, as needed. These include promoters, enhancers, signal sequences and other trafficking sequences, and other such regulatory sequences that are well-known to those of skill in the art. For vectors with particular tissue tropisms, the regulatory sequences can be specific for such tissues, such as the liver for long-term gene expression, or the eye for any ophthalmic applications. Exemplary promoters include inducible and constitutive promoters for expression in mammalian cells. Such promoters, which are those recognized in a eukaryotic, such as a mammalian, subject, include, but are not limited to, CMV and SV40 promoters; adenovirus promoters, such as the E2 gene promoter, which is responsive to the E7 oncoprotein; a PV promoter, such as the BPV p89 promoter that is responsive to the PV E2 protein; and other suitable promoters.

[1283] A polypeptide provided herein also can be delivered to the cells in gene transfer vectors. The transfer vectors also can encode additional other therapeutic agent(s) for treatment of the disease or disorder, such as rheumatoid arthritis, or any other chronic inflammatory, autoimmune, neurodegenerative, or demyelinating disease or disorder, described herein or known in the art, for which the polypeptide is administered. Transfer vectors encoding a polypeptide provided herein can be used systemically, by administering the nucleic acid molecule to a subject. For example, the transfer vector can be a viral vector, such as an adenovirus vector. Vectors encoding a polypeptide or construct herein also can be incorporated into stem cells, and such stem cells can be administered to a subject, such as by transplanting or engrafting the stem cells at sites for therapy. For example, mesenchymal stem cells (MSCs) can be engineered to express a therapeutic polypeptide, and such MSCs can be engrafted at a transplant site for therapy.

[1284] Rather than delivering the protein, the nucleic acid can be administered in vivo, such as systemically, or by any other route, or ex vivo, such as by removal of cells, including lymphocytes, introduction of the nucleic acid therein, and reintroduction into the host, or a compatible recipient.

[1285] Polypeptides can be delivered to cells and tissues by expression of nucleic acid molecules. Polypeptides can be administered as nucleic acid molecules encoding the polypeptides, including ex vivo techniques, and direct in vivo expression. Nucleic acids can be delivered to cells and tissues by any method known to those of skill in the art. The isolated nucleic acid sequences can be incorporated into vectors for further manipulation. Methods for administering polypeptides by expression of encoding nucleic acid molecules include administration of recombinant vectors. The vector can be designed to remain episomal, such as by inclusion of an origin of replication, or can be designed to integrate into a chromosome in the cell. Nucleic acid molecules encoding polypeptides provided herein also can be used in ex vivo gene expression therapy using non-viral vectors. For example, cells can be engineered to express a polypeptide, either operatively linked to regulatory sequences, or such that it is placed operatively linked to regulatory sequences in a genomic location. Such cells then can be administered locally or systemically to a subject, such as a patient in need of treatment.

[1286] Gene therapy vectors can remain episomal, or can integrate into chromosomes of the treated subject. A polypeptide can be expressed by a virus, which is administered to a subject in need of treatment. Viral vectors suitable for gene therapy include adenoviruses, adeno-associated viruses (AAVs), retroviruses, lentiviruses, vaccinia viruses, and others noted above. Viral vectors, which include, for example, adenoviruses, adeno-associated viruses (AAVs), poxviruses, herpesviruses, retroviruses, and others designed for gene therapy, can be employed. AAV vectors with altered tropism, such as for liver cells, are available. AAV vectors are composed of a capsid that confers the tropism, and nucleic acid encoding the polypeptide flanked by ITRs.

[1287] For example, adenovirus expression technology is well-known in the art, and adenovirus production and administration methods also are well-known. Adenovirus serotypes are available, for example, from the American Type Culture Collection (ATCC, Rockville, Md.). Adenovirus vectors can be used ex vivo, for example, cells are isolated from a patient in need of treatment, and transduced with a polypeptide-expressing adenovirus vector. After a suitable culturing period, the transduced cells are administered to a subject, locally and/or systemically. Alternatively, polypeptide adenovirus particles are isolated and formulated in a pharmaceutically-acceptable carrier for delivery of a therapeutically effective amount to prevent, treat, or ameliorate a disease or condition of a subject. Typically, adenovirus particles are delivered at a dose ranging from 1 particle to 10¹⁴ particles per kilogram subject weight, generally between 10⁶ or 10⁸ particles to 10¹² particles per kilogram subject weight. In some situations, it is desirable to provide a nucleic acid source with an agent that targets cells, such as an antibody specific for a cell surface membrane protein or a target cell, or a ligand for a receptor on a target cell. The polypeptides or constructs provided herein also can be targeted for delivery into specific cell types. For example, adenoviral vectors encoding the polypeptides or constructs provided herein can be used for stable expression in nondividing cells, such as liver cells (see, e.g., Margaritis et al. (2004) J. Clin. Invest. 113:1025-1031). In another example, viral or non-viral vectors encoding polypeptides or constructs herein can be transduced into isolated cells for subsequent delivery. Additional cell types for expression and delivery include, but are not limited to, fibroblasts and endothelial cells.

[1288] The nucleic acid molecules can be introduced into artificial chromosomes, and other non-viral vectors. Artificial chromosomes, such as ACES (see, Lindenbaum et al., (2004) Nucleic Acids Res. 32(21):e172), can be engineered to encode and express the isoform. Briefly, mammalian artificial chromosomes (MACs) provide a means to introduce large payloads of genetic information into the cell in an autonomously replicating, non-integrating format. Unique among MACs, the mammalian satellite DNA-based Artificial Chromosome Expression (ACE) can be reproducibly generated de novo in cell lines of different species and readily purified from the host cells' chromosomes. Purified mammalian ACEs can then be re-introduced into a variety of recipient cell lines where they have been stably maintained for extended periods in the absence of selective pressure using an ACE System. Using this approach, specific loading of one or two gene targets has been achieved in LMTK(−) and CHO cells.

[1289] Another method for introducing nucleic acids encoding a polypeptide is a two-step gene replacement technique in yeast, starting with a complete adenovirus genome (Ad2; Ketner et al. (1994) Proc. Natl. Acad. Sci. U.S.A. 91: 6186-6190) cloned in a Yeast Artificial Chromosome (YAC) and a plasmid containing adenovirus sequences to target a specific region in the YAC clone, an expression cassette for the gene of interest and a positive and negative selectable marker. YACs are of particular interest because they permit incorporation of larger genes. This approach can be used for construction of adenovirus-based vectors bearing nucleic acids encoding any of the described polypeptides or constructs herein for gene transfer to mammalian cells or whole animals.

[1290] The nucleic acids can be encapsulated in a vehicle, such as a liposome, or introduced into a cell, such as a bacterial cell, particularly an attenuated bacterium, or introduced into a viral vector. For example, when liposomes are employed, proteins that bind to a cell surface membrane protein associated with endocytosis can be used for targeting and/or to facilitate uptake, e.g., capsid proteins or fragments thereof tropic for a particular cell type, antibodies for proteins which undergo internalization in cycling, and proteins that target intracellular localization and enhance intracellular half-life.

[1291] For ex vivo and in vivo methods, nucleic acid molecules encoding the polypeptide or construct herein is introduced into cells that are from a suitable donor or the subject to be treated. Cells into which a nucleic acid can be introduced for purposes of therapy include, for example, any desired, available cell type appropriate for the disease or condition to be treated, including but not limited to epithelial cells; endothelial cells; keratinocytes; fibroblasts; muscle cells; hepatocytes; blood cells, such as T lymphocytes, B lymphocytes, monocytes, macrophages, neutrophils, eosinophils, megakaryocytes, and granulocytes; and various stem or progenitor cells, in particular, hematopoietic stem or progenitor cells, such as stem cells obtained from bone marrow, umbilical cord blood, peripheral blood, fetal liver, and other sources thereof.

[1292] For ex vivo treatment, cells from a donor compatible with the subject to be treated or cells from the subject to be treated are removed, the nucleic acid is introduced into these isolated cells, and the modified cells are administered to the subject. Treatment includes direct administration, such as, for example, encapsulated within porous membranes, which are implanted into the patient (see, e.g., U.S. Pat. Nos. 4,892,538 and 5,283,187, each of which is herein incorporated by reference in its entirety). Techniques suitable for the transfer of nucleic acid into mammalian cells in vitro include the use of liposomes and cationic lipids (e.g., DOTMA, DOPE and DC-Chol) electroporation, microinjection, cell fusion, DEAE-dextran, and calcium phosphate precipitation methods. Methods of DNA delivery can be used to express the polypeptides or constructs provided herein in vivo. Such methods include liposome delivery of nucleic acids and naked DNA delivery, including local and systemic delivery, such as using electroporation, ultrasound, and calcium-phosphate delivery. Other techniques include microinjection, cell fusion, chromosome-mediated gene transfer, microcell-mediated gene transfer, and spheroplast fusion.

[1293] In vivo expression of a polypeptide or construct herein can be linked to expression of additional molecules. For example, expression of a polypeptide can be linked with expression of a cytotoxic product, such as in an engineered virus, or expressed in a cytotoxic virus. Such viruses can be targeted to a particular cell type that is a target for a therapeutic effect.

[1294] In vivo expression of a polypeptide or construct provided herein can include operatively linking polypeptide-encoding nucleic acid molecules to specific regulatory sequences, such as a cell-specific or tissue-specific promoter. Polypeptides also can be expressed from vectors that specifically infect and/or replicate in target cell types and/or tissues. Inducible promoters can be used to selectively regulate polypeptide or construct expression.

[1295] Nucleic acid molecules, such as naked nucleic acids, or vectors, artificial chromosomes, liposomes and other vehicles can be administered to the subject by systemic administration, topical, local and other routes of administration. When systemic and in vivo, the nucleic acid molecule or vehicle containing the nucleic acid molecule can be targeted to a cell. Administration can include intravenous administration, and direct injection into a tissue, such as direct injection into the liver, including methods of direct injection into a compartmentalized organ or portion thereof, such as the liver (see, e.g., U.S. Pat. No. 9,821,114).

[1296] Administration also can be direct, such as by administration of a vector or cells that typically targets a cell or tissue. Cells used for in vivo expression of a polypeptide or construct herein also include cells autologous to the patient. Such cells can be removed from a patient, the nucleic acids for expression of a polypeptide introduced, and then administered to a patient, such as by injection or engraftment.

### J. COMPOSITIONS, FORMULATIONS AND DOSAGES

[1297] Provided are pharmaceutical compositions containing, in a pharmaceutically acceptable vehicle, any of the polypeptides and constructs provided herein, including the TNFR1 antagonist constructs, the TNFR2 agonist constructs, and multi-specific, such as bi-specific, TNFR1 antagonist/TNFR2 agonist constructs, including fusion proteins, or nucleic acid molecules encoding the polypeptides or constructs. Such compositions contain an amount of the polypeptides, constructs, or nucleic acids that can be diluted to a therapeutically effective amount, or that are formulated for direct administration without dilution. The particular concentration of a construct or nucleic acid depends upon a variety of parameters within the skill of a skilled artisan, including, for example, the treated indication, the construct or nucleic acid, the route of administration, and the regimen. Routes of administration include systemic and local routes, oral, rectal, intravenous, intramuscular, subcutaneous, mucosal, peritoneal, and any suitable route known to the skilled person.

[1298] A selected amount, such as a therapeutically effective amount, depending, as discussed above, on various parameters of the constructs provided herein, including the TNFR1 antagonist constructs, the TNFR2 agonist constructs, and multi-specific, such as bi-specific, TNFR1 antagonist/TNFR2 agonist constructs, including fusion proteins, or nucleic acid molecules encoding the constructs, is formulated in a suitable vehicle for administration. The pharmaceutical compositions can be formulated in any conventional manner, by mixing a selected amount of a construct or mixture thereof with one or more physiologically acceptable carriers or excipients or vehicles The pharmaceutical composition can be used for therapeutic, prophylactic, and/or diagnostic applications. The concentration of the active compound, i.e., the construct or nucleic acid, in a composition, depends on a variety of factors, including those noted above, as well as the absorption, inactivation, and excretion rates of the active compound, the dosage schedule, and the amount administered, the age and size of the subject, as well as other factors known to those of skill in the art.

[1299] Pharmaceutical carriers or vehicles suitable for administration of the compounds provided herein include any such carriers known to those skilled in the art to be suitable for the particular mode of administration. Pharmaceutical compositions that include a therapeutically effective amount of a construct or nucleic acid molecule described herein also can be provided as a lyophilized powder that is reconstituted, such as with sterile water, immediately prior to administration.

[1300] 1. Formulations

[1301] Pharmaceutical compositions containing any of the constructs and nucleic acids provided herein can be formulated in any conventional manner, by mixing a selected amount of the active compound with one or more physiologically acceptable carriers or excipients. Selection of the carrier or excipient is within the skill of the administering professional, and can depend upon a number of parameters. These include, for example, the mode of administration (i.e., systemic, oral, nasal, pulmonary, local, topical, or any other mode), and the disorder treated. Generally, the pharmaceutical compositions include components that do not significantly impair the biological properties of the constructs or nucleic acid or encoded polypeptide or that enhance or improve pharmacological properties thereof. The formulations also can be co-formulations with other active agents for combination therapy.

[1302] The pharmaceutical compositions provided herein can be in various forms, such as, but are limited to, in solid, semi-solid, liquid, emulsions, powder, aqueous, and lyophilized forms. The pharmaceutical compositions provided herein can be formulated for single dosage (direct) administration, or for dilution, or other regimen. The concentrations of the compounds in the formulations are effective, either following dilution or mixing with another composition, or for direct administration, for delivery of an amount, upon administration, that is effective for the intended treatment. The compositions can be formulated in an amount single or multiple dosage direct administration. The compound can be suspended in micronized or other suitable form, or can be derivatized to produce a more soluble active product. The form of the resulting mixture depends upon a number of factors, including the intended mode of administration, and the solubility of the compound in the selected carrier or vehicle. The resulting mixtures are solutions, suspensions, emulsions and other such mixtures, and can be formulated as non-aqueous or aqueous mixtures, creams, gels, ointments, emulsions, solutions, elixirs, lotions, suspensions, tinctures, pastes, foams, aerosols, irrigations, sprays, suppositories, bandages, or any other formulation suitable for systemic, topical or local administration. For local internal administration, such as intramuscular, parenteral or intra-articular administration, the constructs and nucleic acids can be formulated as a solution suspension in an aqueous-based medium, such as isotonically buffered saline, or are combined with a biocompatible support or bioadhesive intended for internal administration. The effective concentration is sufficient for ameliorating the targeted condition and can be empirically determined. To formulate a composition, the weight fraction of compound is dissolved, suspended, dispersed, or otherwise mixed in a selected vehicle, at an effective concentration, such that the targeted condition is relieved or ameliorated.

[1303] Generally, pharmaceutically acceptable compositions are prepared in view of approvals for a regulatory agency, or other agency, and/or are prepared in accordance with generally recognized pharmacopeia for use in animals and in humans. Pharmaceutical compositions can include a carrier, such as a diluent, adjuvant, excipient, or vehicle, with which a polypeptide is administered. Such pharmaceutical carriers can be sterile liquids, such as water and oils, including those of petroleum, animal, vegetable or synthetic origin, such as peanut oil, soybean oil, mineral oil, and sesame oil. Water is a typical carrier when the pharmaceutical composition is administered intravenously. Saline solutions and aqueous dextrose and glycerol solutions also can be employed as liquid carriers, particularly for injectable solutions. Compositions can contain, along with an active ingredient, a diluent, such as lactose, sucrose, dicalcium phosphate, and carboxymethylcellulose; a lubricant, such as magnesium stearate, calcium stearate and talc; and a binder, such as starch, natural gums, such as gum acacia, gelatin, glucose, molasses, polyvinylpyrrolidone, celluloses and derivatives thereof, povidone, crospovidone, and other such binders known to those of skill in the art. Suitable pharmaceutical excipients include starch, glucose, lactose, sucrose, gelatin, malt, rice, flour, chalk, silica gel, sodium stearate, glycerol monostearate, talc, sodium chloride, dried skim milk, glycerol, propylene glycol, water, and ethanol. A composition, if desired, also can contain minor amounts of wetting or emulsifying agents, or pH buffering agents, for example, acetate, sodium citrate, cyclodextrin derivatives, sorbitan monolaurate, triethanolamine sodium acetate, triethanolamine oleate, and other such agents. These compositions can take the form of solutions, suspensions, emulsions, tablets, pills, capsules, powders, granules, and sustained release formulations. Capsules and cartridges of, e.g., gelatin, for use in an inhaler or insufflator, can be formulated containing a powder mix of a therapeutic compound and a suitable powder base, such as lactose or starch. A composition can be formulated as a suppository, with traditional binders and carriers, such as triglycerides. Oral formulations can include standard carriers, such as pharmaceutical grades of mannitol, lactose, starch, magnesium stearate, sodium saccharine, cellulose, magnesium carbonate, and other such agents. Preparations for oral administration also can be suitably formulated with protease inhibitors, such as a Bowman-Birk inhibitor, a conjugated Bowman-Birk inhibitor, aprotinin and camostat. Examples of suitable pharmaceutical carriers are described in “Remington's Pharmaceutical Sciences” by E. W. Martin. Such compositions will contain a therapeutically effective amount of the compound, generally in purified form, together with a suitable amount of carrier, so as to provide the compound in a form for proper administration to a subject or patient.

[1304] The pharmaceutical compositions provided herein can contain other additives, including, for example, antioxidants, preservatives, antimicrobial agents, analgesic agents, binders, disintegrants, colorings, diluents, excipients, extenders, glidants, solubilizers, stabilizers, tonicity agents, vehicles, viscosity agents, flavoring agents, emulsions, such as oil-in-water or water-in-oil emulsions, emulsifying and suspending agents, such as acacia, agar, alginic acid, sodium alginate, bentonite, carbomer, carrageenan, carboxymethylcellulose, cellulose, cholesterol, gelatin, hydroxyethyl cellulose, hydroxypropyl cellulose, hydroxypropyl methylcellulose, methylcellulose, octoxynol-9, oleyl alcohol, povidone, propylene glycol monostearate, sodium lauryl sulfate, sorbitan esters, stearyl alcohol, tragacanth, xanthan gum, and derivatives thereof, solvents, and miscellaneous ingredients, such as crystalline cellulose, microcrystalline cellulose, citric acid, dextrin, dextrose, liquid glucose, lactic acid, lactose, magnesium chloride, potassium metaphosphate, and starch, among others (see, generally, Alfonso R. Gennaro (2000) Remington: The Science and Practice of Pharmacy, 20th Edition. Baltimore, Md.: Lippincott Williams & Wilkins). Such carriers and/or additives can be formulated by conventional methods and can be administered to the subject at a suitable dose. Stabilizing agents, such as lipids, nuclease inhibitors, polymers, and chelating agents, can preserve the compositions from degradation within the body.

[1305] The formulation should suit the mode of administration. For example, the active compound can be formulated for parenteral administration by injection (e.g., by bolus injection, or continuous infusion). The injectable compositions can take such forms as suspensions, solutions or emulsions in oily or aqueous vehicles. The sterile injectable preparation also can be a sterile injectable solution, or a suspension in a non-toxic parenterally-acceptable diluent or solvent, for example, as a solution in 1,4-butanediol. Sterile, fixed oils are conventionally employed as a solvent or suspending medium. For this purpose, any bland fixed oil can be employed, including, but not limited to, synthetic mono- or diglycerides, fatty acids (including oleic acid), naturally occurring vegetable oils, such as sesame oil, coconut oil, peanut oil, cottonseed oil, and other oils, or synthetic fatty vehicles like ethyl oleate. Buffers, preservatives, antioxidants, and the suitable ingredients, can be incorporated as required, or, alternatively, can comprise the formulation.

[1306] The active compound, such as the constructs and nucleic acids provided herein, can be formulated as the sole pharmaceutically active ingredient in the composition, or can be combined with other active ingredients. The active compound can be targeted for delivery, such as by conjugation to a targeting agent, such as an antibody. Liposomal suspensions, including tissue-targeted liposomes, also can be suitable as pharmaceutically acceptable carriers. These can be prepared according to methods known to those skilled in the art. For example, liposome formulations can be prepared by methods well known to those of skill in the art, such as those as described in U.S. Pat. No. 4,522,811. Liposomal delivery also can include slow release formulations, including pharmaceutical matrices, such as collagen gels and liposomes modified with fibronectin (see, e.g., Weiner et al. (1985) J. Pharm. Sci. 74(9):922-925). The compositions provided herein further can contain one or more adjuvants that facilitate delivery, such as, but not limited to, inert carriers, or colloidal dispersion systems. Representative and non-limiting examples of such inert carriers can be selected from water, isopropyl alcohol, gaseous fluorocarbons, ethyl alcohol, polyvinylpyrrolidone, propylene glycol, a gel-producing material, stearyl alcohol, stearic acid, spermaceti, sorbitan monooleate, methylcellulose, as well as suitable combinations of two or more thereof.

[1307] The active compound is included in the pharmaceutically acceptable carrier in an amount sufficient to exert a therapeutically useful effect in the absence of undesirable side effects on the subject treated. The therapeutically effective concentration can be determined empirically by testing the compounds in known in vitro and in vivo systems, such as the assays described herein. Determination of a therapeutically effective amount is well within the capability of those skilled in the art. Therapeutically effective dosages can be determined by using in vitro and in vivo methods as described herein. Accordingly, an active compound, or mixtures thereof, provided herein, when in a pharmaceutical preparation, can be present in unit dose forms for administration.

[1308] 2. Administration of the TNFR1 Antagonist Constructs, TNFR2 Agonist Constructs, the Multi-Specific, such as Bi-Specific, Constructs and Nucleic Acids

[1309] The active compounds, including the constructs provided herein, including the TNFR1 antagonist constructs, the TNFR2 agonist constructs, and multi-specific, such as bi-specific, TNFR1 antagonist/TNFR2 agonist constructs, including fusion proteins, and nucleic acid molecules encoding the constructs, can be administered by any suitable route. These include in vitro, ex vivo, or in vivo, by contacting a mixture, such as a body fluid or other tissue sample, with the active compound provided herein. For example, when administering a compound ex vivo, a body fluid, such as the vitreous, or tissue sample from a subject, can be contacted with the polypeptides that are coated on a tube or filter, such as, for example, a tube or filter in a bypass machine. When administering in vivo, the active compounds can be administered by any appropriate route, for example, orally, nasally, pulmonary, parenterally, intravenously, intradermally, intravitreally, intraretinally, subretinally, periocularly, subcutaneously, intraarticularly, intracisternally, intraocularly, intraventricularly, intrathecally, intramuscularly, intraperitoneally, intratracheally, rectally, or topically, or by direct injection into an organ, as well as by any combination of any two or more thereof, in liquid, semi-liquid or solid form, and are formulated in a manner suitable for each route of administration.

[1310] The route of administration is in accord with known methods, e.g., injection or infusion by intravenous, intraperitoneal, intracerebral, intramuscular, subcutaneous, intraocular, intraarterial, intrathecal, inhalation or intralesional routes, topical, or by sustained release systems. The antibody or fragment thereof is typically administered continuously by infusion or by bolus injection. The active compounds provided herein can be prepared in a mixture with a pharmaceutically acceptable carrier, as discussed above. Techniques for formulation and administration of the compounds are known to one of skill in the art. This therapeutic composition can be administered intravenously or through the nose or lung, such as, as a liquid or powder aerosol (lyophilized). The composition also can be administered parenterally or subcutaneously as desired. When administered systematically, the therapeutic composition should be sterile, pyrogen-free, and in a parenterally acceptable solution having due regard for pH, isotonicity, and stability, and other conditions known to those skilled in the art.

[1311] Therapeutic formulations can be administered in many conventional dosage formulations. Dosage formulations of the active compounds provided herein are prepared for storage or administration by mixing the compound having the desired degree of purity with physiologically acceptable carriers, excipients, or stabilizers. Such materials are non-toxic to the recipients at the dosages and concentrations employed, and can include buffers such as TRIS HCl, phosphate, citrate, acetate and other organic acid salts; antioxidants such as ascorbic acid; low molecular weight (less than about ten residues) peptides such as polyarginine; proteins, such as serum albumin, gelatin, or immunoglobulins; hydrophilic polymers, such as polyvinylpyrrolidone; amino acids, such as glycine, glutamic acid, aspartic acid, or arginine; monosaccharides, disaccharides, and other carbohydrates, including cellulose or its derivatives, glucose, mannose, or dextrins; chelating agents, such as EDTA; sugar alcohols, such as mannitol or sorbitol; counter ions, such as sodium and/or nonionic surfactants, such as those sold under the trademarks TWEEN and PLURONICS, and polyethylene glycol (PEG).

[1312] Pharmaceutical compositions can contain a stabilizing agent. The stabilizing agent can be an amino acid, amino acid derivative, amine, sugar, polyols, salts or surfactants. In some examples, the stable co-formulations contain a single stabilizing agent. In other examples, the stable co-formulations contain 2, 3, 4, 5 or 6 different stabilizing agents. For example, the stabilizing agent can be a sugar or polyol, such as a glycerol, sorbitol, mannitol, inositol, sucrose or trehalose. In particular examples, the stabilizing agent is sucrose. In other examples, the stabilizing agent is trehalose. The concentration of the sugar or polyol is from or from about 100 mM to 500 mM, 100 mM to 400 mM, 100 mM to 300 mM, 100 mM to 200 mM, 200 mM to 500 mM, 200 mM to 400 mM, 200 mM to 300 mM, 250 mM to 500 mM, 250 mM to 400 mM, 250 mM to 300 mM, 300 mM to 500 mM, 300 mM to 400 mM, or 400 mM to 500 mM, each inclusive.

[1313] In examples, the stabilizing agent can be a surfactant that is a polypropylene glycol, polyethylene glycol, glycerin, sorbitol, poloxamer and polysorbate. For example, the surfactant can be a polypropylene glycol, polyethylene glycol, glycerin, sorbitol, poloxamer or polysorbate, such as a poloxamer 188, polysorbate 20 and polysorbate 80. In particular examples, the stabilizing agent is polysorbate 80. The concentration of surfactant, as a % of mass concentration (w/v) in the formulation, is between or about between 0.005% to 1.0%, 0.01% to 0.5%, 0.01% to 0.1%, 0.01% to 0.05%, or 0.01% to 0.02%, each inclusive.

[1314] For in vivo administration, the formulation should be sterile. This readily is accomplished, such as by filtration through sterile filtration membranes, prior to, or following lyophilization and reconstitution. The formulation can be stored in lyophilized form or in solution. Other vehicles, such as naturally occurring vegetable oil, such as sesame, peanut, or cottonseed oil, or a synthetic fatty vehicle, such as ethyl oleate, or the like, can be used. Buffers, preservatives, antioxidants and the like can be incorporated according to accepted pharmaceutical practice.

[1315] Determination of dosage is within the skill of the physician, and can be a function of the particular disorder, route of administration and subject. Exemplary dosages, include for example 0.1 to 100 mg/kg, such as 1 to 10 mg/kg, or an appropriate amount based on the mass of the treated subject; average human subjects have a mass of about 70-75 kg. The polypeptides can be administered once or more than once, such as twice, three times, four times, or any number of times that are required to achieve a therapeutic effect. Multiple administrations can be effected via any route or combination of routes, and can be administered hourly, every 2 hours, every three hours, every four hours or more.

[1316] The active compounds can be provided at a concentration in the composition of, for example, from or from about 0.1 to 10 mg/mL, such as, for example, a concentration that is at least or at least about 0.1, 0.2, 0.3, 0.4, 0.5, 0.6, 0.7, 0.8, 0.9, 1.0, 1.5, 2.0, 2.5, 3.0, 3.5, 4.0, 4.5, 5.0, 5.5, 6.0, 6.5, 7.0, 7.5, 8.0, 8.5, 9.0, 9.5, or 10 mg/mL, or more. The volume of the solution can be at or about 0.1 to 100 mL or more, such as, for example, at least or about at least or 0.5, 1, 2, 3, 4, 5, 10, 15, 20, 25, 30, 35, 40, 45, 50, 55, 60, 65, 70, 75, 80, 85, 90, 95, or 100 mL, or more. In some examples, the active compound is supplied in phosphate buffered saline. For example, the compositions can be can be supplied as a 50 mL, vial or other container containing 100 mg of polypeptide or fusion protein at a concentration of 2 mg/mL in phosphate buffered saline.

[1317] Active compounds provided herein, can be lyophilized for storage and reconstituted in a suitable carrier prior to use. This technique has been shown to be effective with conventional immunoglobulins and protein preparations, and art-known lyophilization and reconstitution techniques can be employed.

[1318] The active compounds provided herein, can be provided as a controlled release or sustained release composition. Polymeric materials are known in the art for the formulation of pills and capsules which can achieve controlled or sustained release (see e.g., Controlled Drug Bioavailability, Drug Product Design and Performance, Smolen and Ball (eds.), Wiley, New York (1984); see, also, Levy et al. (1985) Science 228:190; During et al. (1989) Ann. Neurol. 25:351; Howard et al. (1989) J. Neurosurg. 71:105; U.S. Pat. Nos. 5,679,377, 5,916,597, 5,912,015, 5,989,463, and 5,128,326; and International Application Publication Nos. WO 99/015154 and WO 99/020253). Examples of polymers used in sustained release formulations include, but are not limited to, poly(2-hydroxy ethyl methacrylate), poly(methyl methacrylate), poly(acrylic acid), poly(ethylene-co-vinyl acetate), poly(methacrylic acid), polyglycolides (PLG), polyanhydrides, poly(N-vinyl pyrrolidone), poly(vinyl alcohol), polyacrylamide, poly(ethylene glycol), polylactides (PLA), poly(lactide-co-glycolides) (PLGA), and polyorthoesters. Generally, the polymer used in a sustained release formulation is inert, free of leachable impurities, stable on storage, sterile, and biodegradable. Any technique known in the art for the production of sustained release formulations can be used to produce a sustained release formulation

[1319] The constructs and nucleic acids, and physiologically acceptable forms thereof salts and solvates, can be formulated for administration by inhalation (either through the mouth or the nose), or other routes of administration, including, for example, oral, transdermal, pulmonary, parenteral or rectal administration. For administration by inhalation, the active compounds can be delivered in the form of an aerosol spray presentation from pressurized packs or a nebulizer with the use of a suitable propellant, e.g., dichlorodifluoromethane, trichlorofluoromethane, dichlorotetrafluoroethane, carbon dioxide, or other suitable gas. In the case of a pressurized aerosol, the dosage unit can be determined by providing a valve to deliver a metered amount. Capsules and cartridges of, for example, gelatin, for use in an inhaler or insufflator, can be formulated containing a powder mix of a therapeutic compound and a suitable powder base, such as lactose or starch.

[1320] For pulmonary administration to the lungs, the constructs can be delivered in the form of an aerosol spray presentation from a nebulizer, turbo nebulizer, or microprocessor-controlled metered dose oral inhaler, with the use of a suitable propellant. Generally, particle size of the aerosol is small, such as in the range of 0.5 to 5 microns. In the case of a pharmaceutical composition formulated for pulmonary administration, detergent surfactants are not typically used. Pulmonary drug delivery is a promising non-invasive method of systemic administration. The lungs represent an attractive route for drug delivery, mainly due to the high surface area for absorption, thin alveolar epithelium, extensive vascularization, lack of hepatic first-pass metabolism, and relatively low metabolic activity.

[1321] For oral administration, the pharmaceutical compositions can take the form of, for example, tablets, pills, liquid suspensions, or capsules prepared by conventional means with pharmaceutically acceptable excipients such as binding agents (e.g., pregelatinized maize starch, polyvinylpyrrolidone or hydroxypropyl methylcellulose); fillers (e.g., lactose, microcrystalline cellulose or calcium hydrogen phosphate); lubricants (e.g., magnesium stearate, talc or silica); disintegrants (e.g., potato starch or sodium starch glycolate); or wetting agents (e.g., sodium lauryl sulfate). The tablets can be coated by methods well known in the art. Liquid preparations for oral administration can take the form of, for example, solutions, syrups or suspensions, or they can be presented as a dry product for constitution with water or other suitable vehicle before use. Such liquid preparations can be prepared by conventional means with pharmaceutically acceptable additives, such as suspending agents (e.g., sorbitol syrup, cellulose derivatives or hydrogenated edible fats); emulsifying agents (e.g., lecithin or acacia); non-aqueous vehicles (e.g., almond oil, oily esters, ethyl alcohol, or fractionated vegetable oils); and preservatives (e.g., methyl or propyl-p-hydroxybenzoates, or sorbic acid). The preparations also can contain buffer salts, flavoring, coloring, and sweetening agents, as appropriate.

[1322] Preparations for oral administration can be formulated for controlled release of the active compound. For buccal administration, the compositions can take the form of tablets or lozenges formulated in a conventional manner. The active compounds can be formulated as a depot preparation. Such long-acting formulations can be administered by implantation (for example, subcutaneously or intramuscularly), or by intramuscular injection. Thus, for example, the therapeutic compounds can be formulated with suitable polymeric or hydrophobic materials (for example, as an emulsion in an acceptable oil) or ion exchange resins, or as sparingly soluble derivatives, for example, as a sparingly soluble salt.

[1323] The active compounds can be formulated for parenteral administration by injection (e.g., by bolus injection or continuous infusion). Formulations for injection can be presented in unit dosage form (e.g., in ampoules or in multi-dose containers) with an added preservative. The compositions can take such forms as suspensions, solutions or emulsions in oily or aqueous vehicles, and can contain formulatory agents, such as suspending, stabilizing and/or dispersing agents. Alternatively, the active ingredient can be in powder-lyophilized form for constitution with a suitable vehicle, e.g., sterile pyrogen-free water, before use.

[1324] The pharmaceutical compositions can be formulated for local or topical application, such as for topical application to the skin (transdermal) and mucous membranes, such as in the eye, in the form of gels, creams, and lotions, and for application to the eye or for intracisternal or intraspinal application. Such solutions, particularly those intended for ophthalmic use, can be formulated as 0.01%-10% isotonic solutions and a pH of about 5-7 with appropriate salts. The compounds can be formulated as aerosols for topical application, such as by inhalation (see, for example, U.S. Pat. Nos. 4,044,126, 4,414,209 and 4,364,923, which describe aerosols for delivery of a steroid useful for treatment of inflammatory diseases, particularly asthma).

[1325] The concentration of active compound in the drug composition depends on absorption, inactivation and excretion rates of the active compound, the dosage schedule, and amount administered as well as other factors known to those of skill in the art. As described further herein, dosages can be determined empirically using comparisons of properties and activities. For example, inhibition of TNF-mediated inflammatory signaling via TNFR1 by the constructs provided herein can be compared to traditional anti-TNF therapies, such as adalimumab.

[1326] The compositions, if desired, can be presented in a package, in a kit or dispenser device, that can contain one or more unit dosage forms containing the active ingredient. In some examples, the composition can be coated on a device, such as for example on a tube or filter in, for example, a bypass machine. The package, for example, contains metal or plastic foil, such as a blister pack. The pack or dispenser device can be accompanied by instructions for administration. The compositions containing the active agents can be packaged as articles of manufacture containing packaging material, an agent provided herein, and a label that indicates the disorder for which the agent is provided. The pharmaceutical compositions can be packaged in unit dosage forms containing an amount of the pharmaceutical composition for a single dose or multiple doses. The packaged compositions can contain a lyophilized powder of the pharmaceutical compositions containing the constructs provided herein, including the TNFR1 antagonist constructs, the TNFR2 agonist constructs, and multi-specific, such as bi-specific, TNFR1 antagonist/TNFR2 agonist constructs, including fusion proteins, and nucleic acid molecules encoding the constructs provided herein, which can be reconstituted (e.g., with water or saline) prior to administration.

[1327] The articles of manufacture provided herein contain packaging materials. Packaging materials for use in packaging pharmaceutical products are well-known to those of skill in the art (see, e.g., U.S. Pat. Nos. 5,323,907, 5,052,558 and 5,033,252). Examples of pharmaceutical packaging materials include, but are not limited to, blister packs, bottles, tubes, inhalers (e.g., pressurized metered dose inhalers (MDI), dry powder inhalers (DPI), nebulizers (e.g., jet or ultrasonic nebulizers) and other single breath liquid systems), pumps, bags, vials, containers, syringes, bottles, and any packaging material suitable for a selected formulation and intended mode of administration and treatment.

[1328] The active compounds, including the constructs provided herein, including the TNFR1 antagonist constructs, the TNFR2 agonist constructs, and multi-specific, such as bi-specific, TNFR1 antagonist/TNFR2 agonist constructs, including fusion proteins, and nucleic acid molecules encoding the constructs, the pharmaceutical compositions, and combinations of the active agents and other compositions, including other therapeutic agents, can be provided as kits. Kits can optionally include one or more components, such as instructions for use, devices, additional reagents (e.g., sterilized water or saline solutions for dilution of the compositions and/or reconstitution of lyophilized protein), and components, such as tubes, containers and syringes, for practice of the methods. Exemplary kits can include the constructs and encoding nucleic acids provided herein, and optionally can include instructions for use, a device for administering the compounds to a subject, a device for detecting the compounds in a subject, a device or devices for detecting the compounds or metabolites thereof in samples obtained from a subject, and a device for administering an additional therapeutic agent to a subject. The kit, optionally, can include instructions for use. Instructions typically include a tangible expression describing the active compound(s), and, optionally, other components included in the kit, and methods for administration, including methods for determining the proper state of the subject, the proper dosage amount, dosing regimens, and administration methods. Instructions also can include guidance for monitoring the subject over the duration of the treatment time.

[1329] Kits also can include a pharmaceutical composition described herein and an item for diagnosis. For example, such kits can include an item for measuring the concentration, amount or activity of the administered active compound in a subject. Kits provided herein also can include a devices for administering the compound(s). Any of a variety of devices known in the art for administering medications to a subject can be included in the kits provided herein. Exemplary devices include, but are not limited to, a hypodermic needle, an intravenous needle, and a catheter. Typically, a device for administering is compatible with the desired method of administration of the active agent.

[1330] 3. Administration of Nucleic Acids Encoding Polypeptides (Gene Therapy)

[1331] Among the pharmaceutical compositions are those containing nucleic acid molecules that encode the polypeptide constructs provided herein. Rather than deliver the protein, nucleic acid molecules can be administered in vivo, such as systemically or by other route, or ex vivo, such as by removal of cells, including lymphocytes, introduction of the nucleic acid molecule therein, and reintroduction into the host or a compatible recipient.

[1332] The polypeptide constructs provided herein, including the TNFR1 antagonist constructs, the TNFR2 agonist constructs, and multi-specific, such as bi-specific, TNFR1 antagonist/TNFR2 agonist constructs, including fusion proteins, can be delivered to cells and tissues by expression of nucleic acid molecules. Nucleic acids can be delivered to cells and tissues by any method known to those of skill in the art. The isolated nucleic acid can be incorporated into vectors for further manipulation. As discussed above, methods for administering the polypeptides by expression of encoding nucleic acid molecules include administration of recombinant vectors. The vector can be designed to remain episomal, such as by inclusion of an origin of replication, or can be designed to integrate into a chromosome in the cell. The polypeptides also can be used in ex vivo gene expression therapy using non-viral vectors. Suitable gene therapy vectors and methods of delivery are known to those of skill in the art, and are discussed in sections above.

### K. THERAPEUTIC USES AND METHODS OF TREATMENT

[1333] Pharmaceutical compositions, such as those described above, are prepared and are administered to subjects with a disease, disorder, or condition amenable to treatment with a construct that inhibits and/or agonizes TNFR1 and TNFR2, respectively. Dosage depends upon the particular disorder, disease or condition that is treated, as well as the particular subject. Typical doses are similar to known TNF blockers, such Etanercept. Exemplary doses, for a subject, including humans and other animals, range from about or 0.1 mg/kg to 100 mg/kg, such as 1 mg/kg to about or 30 mg/kg, such as 5 mg/kg to 25 mg/kg. Dose can be determined based on the assumption that an average human has a mass of about 75 kg. Doses can be adjusted for children, infants, and smaller adults.

[1334] The TNFR1 antagonists, TNFR2 agonists, bi-specific TNFR1 antagonist/TNFR2 agonist constructs and fusion proteins provided herein can be used for any purpose known to the skilled artisan for use of such molecules, including for treatment of any diseases, disorders, and conditions described herein. For example, the TNFR1 antagonists, TNFR2 agonists, multi-specific TNFR1 antagonist/TNFR2 agonist constructs, and fusion proteins provided herein can be used for one or more of therapeutic, diagnostic, industrial and/or research purpose(s). Methods of treatment provided herein include methods for the therapeutic uses of the TNFR1 antagonists, TNFR2 agonists, multi-specific TNFR1 antagonist/TNFR2 agonist constructs and fusion proteins provided herein. For example, the TNFR1 antagonists described herein can be used to antagonize TNFR1, and/or to inhibit the binding of TNF to TNFR1, and/or to inhibit TNF-mediated pro-inflammatory signaling through TNFR1. The TNFR2 agonists can be used to agonize TNFR2, in order to induce protective/anti-inflammatory TNFR2 signaling, and/or induce the expansion, proliferation and activation of immunosuppressive TNFR2⁺ regulatory T-cells (Tregs). In some embodiments, as described herein, the combination of the TNFR1 antagonists and TNFR2 agonists, or the use of the bi-specific TNFR1 antagonist/TNFR2 agonist constructs provided herein, provides for the selective inhibition of pro-inflammatory TNFR1 activity, while maintaining or increasing TNFR2-associated protective signaling and Treg immunosuppressive activity, which is beneficial in the treatment of chronic inflammatory and autoimmune diseases, as well as in the treatment of neurodegenerative and demyelinating diseases and disorders.

[1335] The TNFR1 antagonists, TNFR2 agonists, multi-specific, such as bi-specific, TNFR1 antagonist/TNFR2 agonist constructs and fusion proteins provided herein can have therapeutic activity alone, or in combination with other agents. TNFR1 antagonists, TNFR2 agonists, bi-specific TNFR1 antagonist/TNFR2 agonist constructs and fusion proteins, and the encoding nucleic acid molecules, provided herein, can be used for the treatment of any condition for which anti-TNF therapies (e.g., adalimumab, infliximab, etanercept, and others described herein and/or known in the art), or other disease-modifying anti-rheumatic drugs (DMARDs; e.g., methotrexate, hydroxychloroquine, sulfasalazine, leflunomide, abatacept, anakinra, rituximab, tocilizumab, tofacitinib, and others described herein and/or known in the art) are employed, including, but not limited to, chronic inflammatory and autoimmune diseases and disorders, as well as neurodegenerative and demyelinating diseases and disorders. For example, the subject to whom the therapeutic molecules provided herein are administered exhibits acute or chronic inflammation of the joints, skin, lungs, and/or gut, and/or suffers from autoimmune diseases, rheumatoid arthritis (RA), psoriasis, psoriatic arthritis, juvenile idiopathic arthritis (JIA), spondyloarthritis, ankylosing spondylitis, Crohn's disease, ulcerative colitis, inflammatory bowel disease (IBD), uveitis, fibrotic diseases, endometriosis, lupus, multiple sclerosis, congestive heart failure, cardiovascular disease, myocardial infarction (MI), atherosclerosis, metabolic diseases, cytokine release syndrome, septic shock, sepsis, acute respiratory distress syndrome (ARDS), severe acute respiratory syndrome (SARS), COVID-19, influenza, acute and chronic neurodegenerative diseases, demyelinating diseases and disorders, stroke, Alzheimer's disease, Parkinson's disease, Behçet's disease, Dupuytren's disease, Tumor Necrosis Factor Receptor-Associated Periodic Syndrome (TRAPS), pancreatitis, type I diabetes, chronic obstructive pulmonary disease (COPD), chronic bronchitis, emphysema, graft rejection, graft versus host disease (GvHD), respiratory diseases, lung inflammation, pulmonary diseases and conditions, asthma, cystic fibrosis, idiopathic pulmonary fibrosis, acute fulminant viral or bacterial infections, pneumonia, genetically inherited diseases with TNF/TNFR1 as the causative pathologic mediator, periodic fever syndrome, and cancer.

[1336] The constructs provided herein, when administered, generally can result in subjects exhibiting reduced or lessened side effects, compared to side effects that can be observed after administration of anti-TNF therapies. Treatment of diseases and conditions with the polypeptides provided herein, such as the TNFR1 antagonists, TNFR2 agonists, and the bi-specific constructs and fusion proteins thereof, can be effected by any suitable route of administration, using suitable formulations as described herein, including, but not limited to, infusion, subcutaneous injection, and inhalation, or intramuscular, intradermal, oral, topical and transdermal administration.

[1337] As discussed elsewhere herein, existing anti-TNF therapies, such as adalimumab, are immunosuppressive, due to the blockade of TNF signaling via TNFR1 and TNFR2, and are associated with a risk of adverse side effects, including, for example, an increased risk of sepsis and serious infections, such as listeriosis, reactivation of tuberculosis, reactivation of hepatitis B/C, reactivation of herpes zoster, and invasive fungal and other opportunistic infections. Anti-TNF agents also can cause worsening of severe congestive heart failure, and can cause drug-induced lupus, liver injury, psoriasis, sarcoidosis, and demyelinating central nervous system (CNS) diseases, and an increased susceptibility to the development of additional autoimmune diseases, as well as lymphomas and solid malignancies, such as non-melanoma skin cancers. Depending on the anti-TNF agent, about 3-33% of treated patients do not respond to treatment, and up to 46% stop responding, resulting in discontinuation or dose increase. Anti-TNF therapies have failed in the treatment of neurodegenerative diseases and CNS conditions, such as Alzheimer's disease, Parkinson's disease, stroke and multiple sclerosis (MS), which have been associated with the overexpression of TNF. Due to the adverse effects associated with the use of anti-TNF agents, the non-responsiveness of some patients, the lack of a sustained response in patients that had an initial response, and the failure to treat and/or the exacerbation of neurodegenerative diseases, such as MS, other therapies are needed. Such therapies are provided herein.

[1338] As described herein, the selective inhibition of TNFR1 retains the potent anti-inflammatory and protective activity of TNFR2 signaling, results in fewer opportunistic infections and cancer, and preserves TNF-induced Treg functions. Prior selective TNFR1 antagonists suffer from immunogenicity, including the formation of anti-drug antibodies (ADAs), poor pharmacokinetics and pharmacodynamics, including, for example, short serum half-life, rapid renal clearance, and/or poor binding affinity and potency. The therapies provided herein overcome the limitations associated with prior selective TNFR1 antagonists. Examples of therapeutic improvements using the polypeptides provided herein, such as the TNFR1 antagonists, include, but are not limited to, lower dosages, fewer and/or less frequent administrations, decreased side effects and increased therapeutic effects.

[1339] Hence, the selective TNFR1 antagonists, TNFR2 agonists, and multi-specific, such as bi-specific TNFR1 antagonist/TNFR2 agonist constructs, and fusion proteins, provided herein, are associated with reduced side effects, can be used, if necessary, at higher dosing regimens, and can have improved efficacy and safety. Side effects that can be reduced, lessened or eliminated, compared to those observed by existing anti-TNF therapeutics, such as adalimumab and others described herein and/or known in the art, include any undesirable non-therapeutic effect described herein or known in the art, such as, but not limited to, sepsis, serious infections, congestive heart failure/cardiotoxicity, generation of antibodies, and the development or worsening of cancer, autoimmune disease and/or demyelinating central nervous system (CNS) disease. In some examples, compared to side effects caused by administration of existing anti-TNF therapeutics, such as adalimumab, administration of a TNFR1 antagonist, bi-specific construct, or fusion protein provided herein decreases the severity of one or more side effects by at least or about 99%, at least or about 95%, at least or about 90%, at least or about 85%, at least or about 80%, at least or about 75%, at least or about 70%, at least or about 65%, at least or about 60%, at least or about 55%, at least or about 50%, at least or about 45%, at least or about 40%, at least or about 35%, at least or about 30%, at least or about 25%, at least or about 20%, at least or about 15%, or at least or about 10%, relative to the severity of the one or more side effects of an anti-TNF therapy.

[1340] Dosage levels and regimens can be determined based upon known dosages and regimens, and, if necessary can be extrapolated based upon the changes in properties of the polypeptides and constructs provided herein, and/or can be determined empirically based on a variety of factors. Such factors include, for example, the body weight of the individual, as well as their general health, age, sex, and diet, and the activity of the specific compound employed, the time of administration, the rate of excretion, drug combinations, the severity and course of the disease, and the patient's disposition to the disease and the judgment of the treating physician. The active ingredient typically is combined with a pharmaceutically effective carrier. The amount of active ingredient that can be combined with the carrier materials to produce a single dosage form or multi-dosage form can vary depending upon the host treated and the particular mode of administration.

[1341] Upon improvement of a patient's condition, a maintenance dose of a compound or composition can be administered, if necessary; and the dosage, the dosage form, or frequency of administration, or a combination thereof, can be modified. In some cases, a subject can require intermittent treatment on a long-term basis upon any recurrence of disease symptoms, or based upon scheduled dosages.

[1342] This section provides exemplary uses and administration methods for the constructs, include polypeptides and encoding nucleic acid molecules provided herein. These described therapies are exemplary only and do not limit the applications of the molecules/constructs provided herein. It is within the skill of a treating physician to identify diseases or conditions which are treatable using a TNFR1 antagonist, TNFR2 agonist, bi-specific TNFR1 antagonist/TNFR2 agonist construct, and fusion protein, as well as an encoding nucleic acid molecule, provided herein.

[1343] 1. Treatment of Chronic Inflammatory/Autoimmune Diseases and Disorders

[1344] As described herein, elevated levels or uncontrolled expression of TNF, as well as deregulation of TNF signaling, can cause chronic inflammation, which can result in the development of autoimmune diseases and tissue damage. TNF signaling via TNFR1 is primarily pro-inflammatory, and drives the development of chronic inflammatory and autoimmune diseases and disorders. For example, TNFR1 signaling is associated with the development of arthritis, inflammatory bowel disease (IBD), and respiratory diseases, among others, as well as with the generation of osteoclasts which results in local bone destruction, and cardiotoxic effects in TNF-induced models of heart failure and myocardial infarction. Thus, the selective blockade of TNFR1 is useful in the treatment of chronic inflammatory and autoimmune diseases and conditions. TNF signaling via TNFR2, which primarily is anti-inflammatory, has been associated with neuro-, cardio-, gut- and osteo-protective effects. The anti-inflammatory and protective effects of TNFR2 signaling have been demonstrated in, for example, experimental colitis, heart failure/heart disease, myocardial infarction, inflammatory arthritis, infectious disease, pancreatic regeneration, stem cell proliferation, the destruction of autoreactive T-cells, and the regulation of osteoclastogenesis for maintaining bone mass, and protecting against joint inflammation and erosive destruction. TNFR2 agonism also results in the proliferation and expansion of immunosuppressive TNFR2⁺ Tregs, and promotes Treg cell suppressive activity, which eliminates autoreactive/effector T-cells, prevents tissue destruction, and suppresses inflammatory and autoimmune diseases and conditions. TNFR2 agonism, thus, also can be used to treat or alleviate the symptoms of chronic inflammatory and autoimmune diseases and conditions.

[1345] The TNFR1 antagonists, TNFR2 agonists, multi-specific TNFR1 antagonist/TNFR2 agonist constructs, fusion proteins, and encoding nucleic acids provided herein can be used to treat or alleviate the symptoms of autoimmune/inflammatory diseases and disorders associated with elevated TNF levels and deregulated TNF signaling. The constructs, fusion proteins and nucleic acids, provided herein, can be used for treating diseases, disorders, and conditions, including, but not limited to, for example, arthritis (e.g., rheumatoid arthritis, psoriatic arthritis, juvenile idiopathic arthritis, spondyloarthritis), inflammatory bowel disease (e.g., Crohn's disease and ulcerative colitis), uveitis, fibrotic diseases (e.g., Dupuytren's disease), Behçet's disease, endometriosis, lupus, ankylosing spondylitis, psoriasis, tumor necrosis factor receptor-associated periodic syndrome (TRAPS), cardiovascular disease, congestive heart failure, myocardial infarction (MI), atherosclerosis, respiratory diseases, asthma, cystic fibrosis, chronic obstructive pulmonary disease (COPD), pancreatitis, type I diabetes, metabolic diseases, cytokine release syndrome, septic shock, sepsis, acute respiratory distress syndrome (ARDS), severe acute respiratory syndrome (SARS), COVID-19, influenza, chronic bronchitis, emphysema, lung inflammation, idiopathic pulmonary fibrosis, graft rejection, graft versus host disease (GvHD), acute fulminant viral or bacterial infections, pneumonia, genetically inherited diseases with TNF/TNFR1 as the causative pathologic mediator, and periodic fever syndrome, among others.

[1346] The TNF blockade also can decrease a cytokine storm observed in some viral infections, such as from the SARS viruses and the infection COVID-19. This can prevent ventilator dependence, multiorgan damage, and death in patients with severe acute respiratory syndrome (SARS), such as that resulting from SARS-CoV-2 and other SARS viruses/coronaviruses. TNF-induced viral syndrome (TIVS) is induced by a TNF-driven cytokine storm that involves not only damage to the lungs, but also multiple organ failure. TIVS is analogous to SIRS (serious inflammatory respiratory syndrome), SARS (severe acute respiratory syndrome), and septicemia (caused by bacteria). These conditions impact lung function, but also many other organs. Severe acute respiratory syndrome coronavirus-2 (SARS-CoV-2, which causes COVID-19) gains access to host cells via angiotensin-converting enzyme, which is expressed in the type II surfactant-secreting alveolar cells of the lungs. Severe COVID-19 is associated with a major immune inflammatory response with abundant neutrophils, lymphocytes, macrophages, and immune mediators. Deaths from COVID-19 primarily result from diffuse alveolar damage with pulmonary edema, hyaline membrane formation, and interstitial mononuclear inflammatory infiltrate compatible with early-phase adult respiratory distress syndrome (ARDS). TNF is present in blood and disease tissues of patients with COVID-19; TNF is involved in almost all acute inflammatory reactions, acting as an amplifier of inflammation. Thus, treatments with the constructs herein are provided.

[1347] 2. Treatment of Neurodegenerative and Demyelinating Diseases and Disorders

[1348] As discussed elsewhere herein, several neurodegenerative and demyelinating diseases and conditions are associated with chronically elevated levels of TNF in the central nervous system (CNS). Elevated levels of TNF, and TNF signaling via TNFR1, are implicated in initiating and maintaining neuroinflammation, and in promoting neuronal cell death, demyelination and cognitive decline. For example, in patients with Alzheimer's disease (AD), TNF promotes microglial activation, synaptic dysfunction, neuronal cell death, and accumulation of plaques and tangles, and, elevated levels of TNF inhibit phagocytosis of amyloid beta (Aβ) in the brains of AD patients, which hinders efficient plaque removal by microglia. In patients with Parkinson's disease (PD), elevated TNF levels result in neuroinflammation and dopaminergic neuron toxicity. Elevated levels of TNF, as well as polymorphisms in the gene encoding TNFR1, are linked to demyelination, and the development of demyelinating disorders, such as multiple sclerosis (MS). The selective blockade of TNF signaling via TNFR1, thus, can be used in the treatment or alleviation of neurodegenerative and demyelinating diseases and disorders, and other conditions of the CNS.

[1349] TNF signaling via TNFR2 is associated with anti-inflammatory and neuroprotective effects. For example, activation of TNFR2 by TNF inhibits seizures, attenuates cognitive dysfunction following brain injury, and promotes remyelination, as well as the survival of neurons. The proliferation, expansion and activation of immunosuppressive Tregs, following TNFR2 agonism, also has neuroprotective effects. For example, TNFR2 signaling promotes Treg cell expansion and suppressive activity in experimental autoimmune encephalomyelitis (EAE), an animal model of inflammatory CNS demyelinating disease, such as multiple sclerosis. TNFR2 agonism, thus, also can be used in the treatment or alleviation of neurodegenerative and demyelinating diseases and disorders, and other conditions of the CNS.

[1350] The TNFR1 antagonist constructs, TNFR2 agonist constructs, multi-specific, such as bi-specific, TNFR1 antagonist/TNFR2 agonist constructs, fusion proteins, and nucleic acids provided herein can be used to treat or ameliorate the symptoms of neurodegenerative and demyelinating diseases, and other CNS disorders and conditions, including, but not limited to, Alzheimer's disease, Parkinson's disease, multiple sclerosis, and stroke.

[1351] 3. Treatment of Cancer and Other Immunosuppressing Diseases, Disorders, and Conditions

[1352] As described herein, tumors are infiltrated by large numbers of immunosuppressive TNFR2⁺ Tregs, which prevent the proliferation of tumor-killing CD8⁺ cytotoxic T lymphocytes (CTLs) (also known as effector T-cells (Teffs)), allowing for tumor growth. Antagonism of TNFR2 on lymphocytes in the tumor microenvironment (TME) restores the balance between the two types of T-cells, by eliminating Tregs, and allowing for the activation and expansion of effector T-cells, resulting in tumor cell lysis (see, e.g., Vanamee et al. (2017) Trends in Molecular Medicine 23(11):P1037-P1046).

[1353] TNFR2 is abundantly expressed on the surfaces of many types of human cancer cells, including, for example, renal cell carcinoma, colon cancer, Hodgkin's lymphoma, multiple myeloma, cutaneous non-Hodgkin's lymphoma, and ovarian cancer. TNFR2 mutations in cancer are associated with gene duplications and constitutive activation. Murine myeloid-derived suppressor cells (MDSCs) also express TNFR2, and its inhibition has been shown to control metastasis in a murine liver cancer model. Additionally, immune checkpoint inhibitors result in the upregulation of TNFR2 on tumor-infiltrating Tregs, leading to tumor immune escape and drug resistance. Not all patients respond to therapy with immune checkpoint inhibitors, patients can relapse, and serious autoimmune side effects have been observed with checkpoint inhibitor therapy (see, e.g., Vanamee et al. (2017) Trends in Molecular Medicine 23(11):P1037-P1046). Thus, blockade of TNFR2 can be used for the treatment of certain types of cancers, by directly killing tumor cells, via the inhibition of immunosuppressive Tregs, which allows for the proliferation of effector T-cells, and by the inhibition of MDSCs, which can prevent the formation of metastases. Because TNFR2 also is expressed on normal tissues (especially macrophages; see, e.g., proteinatlas.org/ensg00000028137-tnfrsf1b/tissue), the TNFR2 antagonist does not have ADCC activity, but does have FcRn activity (or enhanced FcRn activity). Administration is personalized, since, as described herein, to qualify for treatment, the patient's tumor must have a significantly higher level of TNFR2 than adjacent normal tissues. For this purpose, the TNFR2 antagonist will be used together with other therapies, especially immunomodulating treatments that otherwise lead to an accumulation of regulatory T-cells in the tumor.

[1354] The TNFR2 agonists, bi-specific TNFR1 antagonist/TNFR2 agonist constructs, and fusion proteins provided herein, thus, also can be used in the treatment of solid cancers, hematological malignancies, and other hyperproliferative diseases and disorders, including, but not limited to, for example, renal cell carcinoma, colon cancer, Hodgkin's lymphoma, multiple myeloma, cutaneous non-Hodgkin's lymphoma, and ovarian cancer.

[1355] 4. Combination Therapies

[1356] Combination therapies include administration of the TNFR1 antagonist constructs, TNFR2 agonist constructs, multi-specific, such as bi-specific, TNFR1 antagonist/TNFR2 agonist constructs, fusion proteins, and nucleic acids provided herein, in combination with another agent or treatment, including radiation and surgery. The further agent or therapy can be administered concurrently, before, after, or intermittently with the treatments provided herein. They can be in separate compositions, or in co-formulations.

[1357] The TNFR1 antagonist constructs, TNFR2 agonist constructs, multi-specific, such as bi-specific, TNFR1 antagonist/TNFR2 agonist constructs, fusion proteins, and nucleic acids provided herein can be administered before, after, intermittently with, or concomitantly with, one or more other therapeutic regimens or agents, including, but not limited to, TNF antagonists/blockers, antibodies, cytotoxic agents, anti-inflammatory agents, cytokines, growth factors, growth inhibitory agents, cardioprotectants, immunosuppressive agents, chemotherapeutic agents, biologic or non-biologic disease-modifying anti-rheumatic drugs (DMARDs), treatments (including antibodies) for infectious diseases, or other therapeutic agents. The TNFR1 antagonist constructs, TNFR2 agonist constructs, multi-specific, such as bi-specific, TNFR1 antagonist/TNFR2 agonist constructs, and nucleic acids provided herein can be administered to the patient as a first-line treatment, or as a second-line therapy where anti-TNF therapeutics were not effective, either as acute or chronic treatments. Exemplary of anti-TNF therapies that can be used in combination therapies herein include, for example, conventional synthetic DMARDs, such as, for example (generic name and exemplary trademark): methotrexate (MTX), hydroxychloroquine (HCQ; Plaquenil®), sulfasalazine (Azulfidine®), and leflunomide (Arava®); biologic DMARDs, such as, for example, abatacept (Orencia®), anakinra (Kineret®), rituximab (Rituxan®, Truxima®, MabThera®), tocilizumab (atlizumab, Actemra®, RoActemra®), corticosteroids (e.g., dexamethasone, methylprednisolone, prednisolone, prednisone, or triamcinolone), tofacitinib (Xeljanz®), and TNF-inhibitors/anti-TNF agents, such as, for example, certolizumab pegol (Cimzia®), infliximab (Remicade®), adalimumab (Humira®), golimumab (Simponi®), and etanercept (Enbrel®). The combination therapy also can include immunotherapeutic drugs, such as, for example, cyclosporine, methotrexate, adriamycin or cisplatinum, and immunotoxins.

[1358] Examples of anti-inflammatory drugs and agents useful for combination therapies include non-steroidal anti-inflammatory drugs (NSAIDs), including salicylates, such as aspirin, traditional NSAIDs, such as ibuprofen, naproxen, ketroprofen, nabumetone, piroxicam, diclofenac, or indomethacin, and Cox-2 selective inhibitors, such as celecoxib (sold under the trademark Celebrex®), or Rotecoxin (sold under the trademark Vioxx®). Other compounds useful in combination therapies include antimetabolites, such as methotrexate and leflunomide; corticosteroids or other steroids, such as cortisone, dexamethasone, or prednisone; analgesics, such as acetaminophen; aminosalicylates, such as mesalamine; and cytotoxic agents, such as azathioprine (sold under the trademark Imuran®), cyclophosphamide (sold under the trademark Cytoxan®), and cyclosporine A.

[1359] Additional agents that can be used in combination therapies include biological response modifiers, including, for example, anti-inflammatory cytokines, such as IL-10; B-cell targeting agents, such as anti-CD20 antibodies (e.g., rituximab); compounds targeting T antigens; adhesion molecule blockers; chemokine receptor antagonists; kinase inhibitors, such as inhibitors of mitogen-activated protein (MAP) Kinase, c-Jun N-terminal Kinase (JNK), or NFκB; and peroxisome proliferator-activated receptor-gamma (PPAR-γ) ligands. Additional agents that can be used in combination therapies include immunosuppressants. Immunosuppressants can include, for example, tacrolimus or FK-506; mycophenolic acid; calcineurin inhibitors (CNIs); CsA; and sirolimus, or other agents known to suppress the immune system.

[1360] The polypeptides and constructs provided herein also can be used in combination with agents that are administered to treat cardiovascular disease and/or administered during procedures to treat cardiovascular disease, such as, for example, anti-coagulants. Exemplary anti-coagulants include, but are not limited to, heparin, warfarin, acenocoumarol, phenindione, EDTA, citrate, oxalate, and direct thrombin inhibitors, such as argatroban, lepirudin, bivalirudin, and ximelagatran.

[1361] The polypeptides and constructs provided herein can be administered with an antibody for the treatment of autoimmune or inflammatory disease, transplant rejection, or GvHD. Examples of such antibodies include, but are not limited to, anti-α4β7 integrin antibodies, such as LDP-02; anti-beta2 integrin antibodies, such as LDP-01; anti-complement (C5) antibodies such as, 5G1.1; anti-CD2 antibodies, such as BTI-322 and MEDI-507; anti-CD3 antibodies, such as OKT3 and SMART anti-CD3; anti-CD4 antibodies, such as IDEC-151, MDX-CD4 and OKT4A; anti-CD11a antibodies; anti-CD14 antibodies, such as IC14; anti-CD18 antibodies; anti-CD23 antibodies, such as IDEC 152; anti-CD25 antibodies, such as daclizumab; anti-CD40L antibodies, such as 5c8, ruplizumab and IDEC-131; anti-CD64 antibodies, such as MDX-33; anti-CD80 antibodies, such as IDEC-114; anti-CD147 antibodies, such as ABX-CBL; anti-E-selectin antibodies, such as CDP850; anti-gpIIb/IIIa antibodies, such as ReoPro®/Abcixima; anti-ICAM-3 antibodies, such as ICM3; anti-ICE antibodies, such as VX-740; anti-FcγR1 antibodies, such as MDX-33; anti-IgE antibodies, such as rhuMAb-E25; anti-IL-4 antibodies, such as SB-240683; anti-IL-5 antibodies, such as SB-240563 and SCH55700; anti-IL-8 antibodies, such as ABX-IL8; anti-interferon gamma antibodies; anti-TNFα antibodies, such as CDP571, CDP870, D2E7, Infliximab and MAK-195F; and anti-VLA-4 antibodies, such as Antegren®. Examples of other Fc-containing molecules that can be co-administered to treat autoimmune or inflammatory disease, transplant rejection and GvHD include, but are not limited to, the TNFR2-Fc fusion protein Enbrel® (etanercept), and Regeneron's IL-1 trap.

[1362] Examples of antibodies that can be co-administered to treat infectious diseases include, but are not limited to, anti-anthrax antibodies, such as ABthrax; anti-CMV antibodies, such as CytoGam and sevirumab; anti-cryptosporidium antibodies, such as CryptoGAM and Sporidin-G; anti-helicobacter antibodies, such as Pyloran; anti-hepatitis B antibodies, such as HepeX-B and Nabi-HB; anti-HIV antibodies, such as HRG-214; anti-RSV antibodies, such as felvizumab, HNK-20, palivizumab, and RespiGam; and anti-staphylococcus antibodies, such as Aurexis, Aurograb, BSYX-A110, and SE-Mab.

[1363] In some examples, the TNFR1 antagonist constructs, TNFR2 agonist constructs, multi-specific, such as bi-specific, TNFR1 antagonist/TNFR2 agonist constructs, fusion proteins, and nucleic acids provided herein are administered with one or more chemotherapeutic agents. Examples of chemotherapeutic agents include, but are not limited, to alkylating agents, such as thiotepa and cyclophosphamide (CYTOXAN®); alkyl sulfonates, such as busulfan, improsulfan and piposulfan; androgens, such as calusterone, dromostanolone propionate, epitiostanol, mepitiostane, and testolactone; anti-adrenals, such as aminoglutethimide, mitotane, and trilostane; anti-androgens, such as flutamide, nilutamide, bicalutamide, leuprolide, and goserelin; antibiotics, such as aclacinomycins, actinomycin, anthramycin, azaserine, bleomycins, cactinomycin, calicheamicin, carubicin, carminomycin, carzinophilin, chromomycins, dactinomycin, daunorubicin, detorubicin, 6-diazo-5-oxo-L-norleucine, doxorubicin, epirubicin, esorubicin, idarubicin, marcellomycin, mitomycins, mycophenolic acid, nogalamycin, olivomycins, peplomycin, porfiromycin, puromycin, quelamycin, rodorubicin, streptonigrin, streptozocin, tubercidin, ubenimex, zinostatin, and zorubicin; anti estrogens, including, for example, tamoxifen, raloxifene, aromatase inhibiting 4(5)-imidazoles, 4-hydroxytamoxifen, trioxifene, keoxifene, LY 117018, onapristone, and toremifene (Fareston); anti-metabolites, such as methotrexate and 5-fluorouracil (5-FU); folic acid analogs, such as denopterin, methotrexate, pteropterin, and trimetrexate; aziridines, such as benzodepa, carboquone, meturedepa, and uredepa; ethylenimines and methylmelamines, including altretamine, triethylenemelamine, triethylenephosphoramide, triethylenethiophosphoramide and trimethylol melamine; folic acid replenishers, such as folinic acid; nitrogen mustards, such as chlorambucil, chlornaphazine, chlorophosphamide, estramustine, ifosfamide, mechlorethamine, mechlorethamine oxide hydrochloride, melphalan, novembichin, phenesterine, prednimustine, trofosfamide, and uracil mustard; nitrosoureas, such as carmustine, chlorozotocin, fotemustine, lomustine, nimustine, ranimustine; platinum analogs, such as cisplatin and carboplatin; vinblastine; platinum; proteins, such as arginine deiminase and asparaginase; purine analogs, such as fludarabine, 6-mercaptopurine, thiamiprine, and thioguanine; pyrimidine analogs, such as ancitabine, azacitidine, 6-azauridine, carmofur, cytarabine, dideoxyuridine, doxifluridine, enocitabine, floxuridine, and 5-FU; taxanes, such as paclitaxel (TAXOL®, Bristol-Myers Squibb Oncology, Princeton, N.J.) and docetaxel (TAXOTERE®, Rhone-Poulenc Rorer, Antony, France); topoisomerase inhibitors, such as RFS 2000; thymidylate synthase inhibitors, such as Tomudex; additional chemotherapeutics, including aceglatone; aldophosphamide glycoside; aminolevulinic acid; amsacrine; bestrabucil; bisantrene; edatrexate; defosfamide; demecolcine; diaziquone; difluoromethylornithine (DMFO); eflornithine; elliptinium acetate; etoglucid; gallium nitrate; hydroxyurea; lentinan; lonidamine; mitoguazone; mitoxantrone; mopidamol; nitracrine; pentostatin; phenamet; pirarubicin; podophyllinic acid; 2-ethylhydrazide; procarbazine; polysaccharide K (PSK, Krestin); razoxane; sizofiran; spirogermanium; tenuazonic acid; triaziquone; 2,2′, 2″-trichlorotriethylamine; urethan; vindesine; dacarbazine; mannomustine; mitobronitol; mitolactol; pipobroman; gacytosine; arabinoside (“Ara-C”); cyclophosphamide; thiotepa; chlorambucil; gemcitabine; 6-thioguanine; mercaptopurine; methotrexate; etoposide (VP-16); ifosfamide; mitomycin C; mitoxantrone; vincristine; vinorelbine; Navelbine; Novantrone; teniposide; daunomycin; aminopterin; Xeloda; ibandronate; CPT-11; retinoic acid; esperamycins; capecitabine; and topoisomerase inhibitors, such as irinotecan. Pharmaceutically acceptable salts, acids or derivatives of any of the above can also be used.

[1364] A chemotherapeutic agent can be administered as a prodrug. Examples of prodrugs that can be administered with a TNFR1 antagonist constructs, TNFR2 agonist constructs, multi-specific, such as bi-specific, TNFR1 antagonist/TNFR2 agonist constructs, fusion proteins, and nucleic acids provided herein include, but are not limited to, for example, phosphate-containing prodrugs, thiophosphate-containing prodrugs, sulfate-containing prodrugs, peptide-containing prodrugs, D-amino acid-modified prodrugs, glycosylated prodrugs, beta-lactam-containing prodrugs, optionally substituted phenoxy acetamide-containing prodrugs, or optionally substituted phenylacetamide-containing prodrugs, and 5-fluorocytosine and other 5-fluorouridine prodrugs which can be converted into the more active cytotoxic free drug. The TNFR1 antagonist constructs, TNFR2 agonist constructs, multi-specific, such as bi-specific, TNFR1 antagonist/TNFR2 agonist constructs can be provided as prodrugs by, for example, linking them to a targeting agent, which targets a particular tissue or locus of disease, with an in vivo a cleavable linker, whereby the active form of the construct is released.

[1365] In some examples, a TNFR1 antagonist constructs, TNFR2 agonist constructs, multi-specific, such as bi-specific, TNFR1 antagonist/TNFR2 agonist constructs, fusion proteins, and nucleic acids provided herein is administered with one or more antibiotics, including, but not limited to: aminoglycoside antibiotics (e.g., apramycin, arbekacin, bambermycins, butirosin, dibekacin, gentamicin, kanamycin, neomycin, netilmicin, paromomycin, ribostamycin, sisomicin, and spectinomycin), aminocyclitols (e.g., spectinomycin), amphenicol antibiotics (e.g., azidamfenicol, chloramphenicol, florfenicol, and thiamphenicol), ansamycin antibiotics (e.g., rifamide and rifampin), carbapenems (e.g., imipenem, meropenem, and panipenem); cephalosporins (e.g., cefaclor, cefadroxil, cefamandole, cefatrizine, cefazedone, cefozopran, cefpimizole, cefpiramide, cefpirome, cefprozil, cefuroxime, cefixime, cephalexin, and cephradine), cephamycins (e.g., cefbuperazone, cefoxitin, cefminox, cefmetazole, and cefotetan); lincosamides (e.g., clindamycin, and lincomycin); macrolide (e.g., azithromycin, brefeldin A, clarithromycin, erythromycin, roxithromycin, and tobramycin), monobactams (e.g., aztreonam, carumonam, and tigemonam); mupirocin; oxacephems (e.g., flomoxef, latamoxef, and moxalactam); penicillins (e.g., amdinocillin, amdinocillin pivoxil, amoxicillin, bacampicillin, benzylpenicillinic acid, benzylpenicillin sodium, epicillin, fenbenicillin, floxacillin, penamecillin, penethamate hydriodide, penicillin o-benethamine, penicillin O, penicillin V, penicillin V benzoate, penicillin V hydrabamine, penimepicycline, and phenethicillin potassium); polypeptides (e.g., bacitracin, colistin, polymixin B, teicoplanin, and vancomycin); quinolones (e.g., amifloxacin, cinoxacin, ciprofloxacin, enoxacin, enrofloxacin, fleroxacin, flumequine, gatifloxacin, gemifloxacin, grepafloxacin, lomefloxacin, moxifloxacin, nalidixic acid, norfloxacin, ofloxacin, oxolinic acid, pefloxacin, pipemidic acid, rosoxacin, rufloxacin, sparfloxacin, temafloxacin, tosufloxacin, and trovafloxacin); rifampin; streptogramins (e.g., quinupristin, and dalfopristin); sulfonamides (e.g., sulfanilamide, and sulfamethoxazole); and tetracyclines (e.g., chlortetracycline, demeclocycline hydrochloride, demethylchlortetracycline, doxycycline, Duramycin, minocycline, neomycin, oxytetracycline, streptomycin, tetracycline, and vancomycin).

[1366] In some examples, the TNFR1 antagonist constructs, TNFR2 agonist constructs, multi-specific, such as bi-specific, TNFR1 antagonist/TNFR2 agonist constructs, fusion proteins, and nucleic acids provided herein can be administered with one or more anti-fungal agents, including, but not limited to, amphotericin B, ciclopirox, clotrimazole, econazole, fluconazole, flucytosine, itraconazole, ketoconazole, miconazole, nystatin, terbinafine, terconazole, and tioconazole. In some examples, a TNFR1 antagonist constructs, TNFR2 agonist constructs, multi-specific, such as bi-specific, TNFR1 antagonist/TNFR2 agonist constructs, and nucleic acids provided herein is administered with one or more antiviral agents, including, but not limited to, protease inhibitors, reverse transcriptase inhibitors, and others, including type I interferons, viral fusion inhibitors, neuraminidase inhibitors, acyclovir, adefovir, amantadine, amprenavir, clevudine, enfuvirtide, entecavir, foscarnet, ganciclovir, idoxuridine, indinavir, lopinavir, pleconaril, ribavirin, rimantadine, ritonavir, saquinavir, trifluridine, vidarabine, and zidovudine.

[1367] The TNFR1 antagonist constructs, TNFR2 agonist constructs, multi-specific, such as bi-specific, TNFR1 antagonist/TNFR2 agonist constructs, fusion proteins, and nucleic acids provided herein can be administered in combination with the growth factor trap constructs described below, and also with any of the therapeutic anti-TNF agents and treatments set forth below, for combination therapies with the growth factor trap constructs. The combination therapy also can include the growth factor trap constructs provided herein.

[1368] Pharmaceutical compositions containing the TNFR1 antagonist constructs, TNFR2 agonist constructs, multi-specific, such as bi-specific, TNFR1 antagonist/TNFR2 agonist constructs, fusion proteins, and nucleic acids provided herein can be used to treat any diseases, disorders, and conditions described herein, or known to those of skill in the art. The diseases, disorders, and conditions include one or more chronic inflammatory, autoimmune, neurodegenerative or demyelinating diseases or conditions. Also provided are combinations of the polypeptides and constructs provided herein, and another treatment or compound, for treatment of a chronic inflammatory, autoimmune, neurodegenerative or demyelinating disease or condition. The TNFR1 antagonist constructs, TNFR2 agonist constructs, multi-specific, such as bi-specific, TNFR1 antagonist/TNFR2 agonist constructs, fusion proteins, and nucleic acids provided herein, and the additional agent(s) can be packaged as separate compositions for administration together, or sequentially, or intermittently. Alternatively, they can be provided as a single composition for administration, or as two compositions for administration as a single composition. The combinations can be packaged as kits, optionally with additional reagents, instructions for use, vials and other containers, syringes and other items for use for treatment.

### L. EXAMPLES

[1369] The following examples are included for illustrative purposes only and are not intended to limit the scope of the invention.

### Example 1

### Expression and Evaluation of Candidate Univalent TNFR1 Antagonist Molecules Expression and Purification of Anti-TNFR1 Molecules

[1370] Candidate univalent TNFR1 antagonist molecules are expressed in mammalian cells, under control of a CMV promoter, using the expression plasmid depicted in FIG. 1 (where TE19080L is the inserted fragment). For the expression of protein therapeutics, such as the constructs herein, mammalian cells, such as Chinese hamster ovary (CHO) or human embryonic kidney 293 (HEK293) cells, are used to provide post-translation modification, including glycosylation, which can be important for proper protein structure, function and activity. Expression in bacterial, yeast or insect cells results, either in no glycosylation (for bacterial cells), or in different glycosylation patterns compared to expression in mammalian cells (for yeast or insect cells). Expression in bacteria also can result in the contamination of the protein therapeutic with bacterial endotoxins, which can activate innate immune cells, complicate the analysis of cell-based assays, and lead to pyrogenic effects upon in vivo administration.

[1371] Expression plasmid construction, as well as transient and stable cell line expression is performed using the methods, such as those described in Vazquez-Lombardi et al. (2018) Nat. Protoc. 13(1):99-117. Five exemplary TNFR1 antagonist molecules are produced for initial evaluation. The TNFR1 antagonist molecules include an H398-derived scFv (SEQ ID NO:678), containing one V_{L} and one V_{H} domain of H398, linked together by a (GGGGS)₃ peptide linker; the TNFR1 antagonist domain antibody (dAb) DOM1h-574-16 (SEQ ID NO:57); the TNFR1 antagonist dAb DOM1h-549 (SEQ ID NO:58); a fusion protein (SEQ ID NO:704), containing the TNFR1 antagonist dAb DOM1h-574-208 (SEQ ID NO:54) from DMS5541 (described elsewhere herein), fused to the anti-serum albumin dAb (albudAb) of DMS5541 (DOM7h-11-3; SEQ ID NO:52) by a (GGGGS)₃ peptide linker; and a fusion protein (SEQ ID NO:705), containing the anti-TNFR1 dAb designated DOM1h-131-206 (SEQ ID NO:59), fused to the anti-serum albumin dAb (albudAb or DOM7h-11-3; SEQ ID NO:52) of DMS5541 by a (GGGGS)₃ peptide linker. The insertion of a (GGGGS)₃ linker in the H398 scFv, and in the DOM1h-574-208 and DOM1h-131-206 fusion proteins, provides more flexibility between the V_{H} and V_{L} domains, and the two dAbs, respectively, and increases the stability and resistance to denaturation of the molecules, improving the manufacturing process. The sequences of each of these TNFR1 antagonist molecules is provided in Table 12, below, some with various linker sequences (see, also Enever et al., (2015) Protein Engineering, Design & Selection 28(3):59-66, which describes dAbs and modifications thereof that can be used for further modification and addition of linkers and modifiers).

TABLE 12

| TNFR1 antagonist | | SEQ ID |
|---|---|---|
| Molecule | Sequence | NO. |
| H398-derived | QVQLQESGAELARPG | 678 |
| scFv | ASVKLSCKASGYTFT | |
| | DFYINWVKQRTGQGL | |
| | EWIGEIYPYSGHAYY | |
| | NEKFKAKATLTADKS | |
| | SSTAFMQLNSLTSED | |
| | SAVYFCVRWDFLDYW | |
| | GQGTTLTVSSGGGGS | |
| | GGGGSGGGGSDIVMT | |
| | QSPLSLPVSLGDQAS | |
| | ISCRSSQSLLHSNGN | |
| | TYLHWYVQKPGQSPK | |
| | LLIYTVSNRFSGVPD | |
| | RFSGSGSGTDFTLKI | |
| | SRVEAEDLGVYFCSQ | |
| | STHVPYTFGGGTKLE | |
| | IKR | |
| DOM1h-574-16 | EVQLLESGGGLVQPG | 57 |
| | GSLRLSCAASGFTFV | |
| | KYSMGWVRQAPGKGP | |
| | EWVSQISNTGDRTYY | |
| | ADSVKGRFTISRDNS | |
| | KNTLYLQMNSLRAED | |
| | TAVYYCAIYTGRWEP | |
| | FDYWGQGTLVTVSS | |
| DOM1h-549 | EVQLLESGGGLVQPG | 58 |
| | GSLRLSCAASGFTFV | |
| | DYEMHWVRQAPGKGL | |
| | EWVSSISESGTTTYY | |
| | ADSVKGRFTISRDNS | |
| | KNTLYLQMNSLRAED | |
| | TAVYYCAKRRFSAST | |
| | FDYWGQGTLVTVSS | |
| DOM1h-574-208- | EVQLLESGGGLVQPG | 704 |
| albudAb fusion | GSLRLSCAASGFTFD | |
| protein | KYSMGWVRQAPGKGL | |
| | EWVSQISDTADRTYY | |
| | AHAVKGRFTISRDNS | |
| | KNTLYLQMNSLRAED | |
| | TAVYYCAIYTGRWVP | |
| | FEYWGQGTLVTVSSG | |
| | GGGSGGGGSGGGGSD | |
| | IQMTQSPSSLSASVG | |
| | DRVTITCRASRPIGT | |
| | TLSWYQQKPGKAPKL | |
| | LILWNSRLQSGVPSR | |
| | FSGSGSGTDFTLTIS | |
| | SLQPEDFATYYCAQA | |
| | GTHPTTFGQGTKVEI | |
| | KR | |
| DOM1h-131-206 | EVQLLESGGGLVQPG | 705 |
| dAb-albudAb | GSLRLSCAASGFTFA | |
| fusion protein | HETMVWVRQAPGKGL | |
| | EWVSHIPPDGQDPFY | |
| | ADSVKGRFTISRDNS | |
| | KNTLYLQMNSLRAED | |
| | TAVYHCALLPKRGPW | |
| | FDYWGQGTLVTVSSG | |
| | GGGSGGGGSGGGGSD | |
| | IQMTQSPSSLSASVG | |
| | DRVTITCRASRPIGT | |
| | TLSWYQQKPGKAPKL | |
| | LILWNSRLQSGVPSR | |
| | FSGSGSGTDFTLTIS | |
| | SLQPEDFATYYCAQA | |
| | GTHPTTFGQGTKVEI | |
| | KR | |

[1372] Also provided are nanobodies and constructs containing nanobodies that comprise two heavy chains selected from among those set forth in any of SEQ TD NOs: 53-83 and 503-671, such as SEQ TD NOs: 57-59, and variants thereof having at least 95%, 96%, 97%, 98%, 99% sequence identity thereto. Constructs are provided that comprise identical heavy chains. Exemplary of these is the TNFR1 dAb designated DOM1h-131-206. Also provided are constructs containing any of these dAbs, such as those that are linked, directly or, more generally, via a linker, such as a GS linker to human serum albumin or provided as an Fc fusion, or in any of the other constructs described herein.

[1373] These and other such dAbs and TNFR1 binding molecules can be modified to increase specificity for TNFR1 by eliminating any antagonistic activity for TNFR2, and/or to increase or add TNFR2 agonist activity, and/or can be modified to reduce or eliminate immunogenic epitopes, and/or can be linked to activity modifiers, such Fc units and modified Fc units/modified Fc dimers, and/or serum half-life extending moieties.

[1374] The HEK293 cell line is used for transient expression, and, following the in vitro evaluation of the expressed antagonists and the identification of molecules with the desired properties, such as high affinity for TNFR1 (e.g., K_{d}<50 nM, or <10 nM, or <or 5 nM), and potent inhibition of TNFR1 signaling (e.g., IC₅₀<50 nM, or <10 nM, or <5 nM), stable cell lines are prepared in a derivative of CHO cells. Generally, it is picomolar (pM) affinity, such as around or about 19 pM affinity or 20 pM, 15 pM, 10 pM, 5 pM, 2 pM, or 1 pM affinity.

[1375] Transient expression is optimized in CHO DG44 cells (e.g., CHO-DG44 (DHFR⁻) and FreeStyle™ CHO-S cells, Invitrogen), resulting in transfected pools that are screened to identify or select high expressing clones. No poly-histidine, or other purification tags, are used. Instead, proteins for screening are purified from serum-free medium by HPLC in combination with other well-known methods. The matrix used for HPLC is the Amsphere™ A3 Protein A chromatography resin (JSR Life Sciences), or other similar resin, following the manufacturer's protocols. If the protein is not at least 95% pure, as judged by size exclusion HPLC, further purification is performed (e.g., ion exchange or hydrophobic chromatography).

[1376] Endotoxin is removed (see, e.g., Vazquez-Lombardi et al. (2018) for an exemplary protocol). After protein purification, endotoxin levels are determined using a detection kit, such as the QCL-1000 Endpoint Chromogenic LAL Assay Kit (Lonza). For endotoxin removal, the theoretical pI of the purified protein is determined using a sequence analysis tool (e.g., ExPASy ProtParam), and the pH low-endotoxin PBS buffer is adjusted to a pH that is below, but close to, the theoretical pI of the purified protein. The protein sample then is dialyzed against at least 30 volumes of pH-adjusted PBS for at least 2 hours at 4° C. An additional dialysis step is performed overnight, and then again for at least 2 hours the following day. The sample then is purified using anion exchange affinity chromatography, retested to determine endotoxin levels, and the process is repeated until an acceptable level of endotoxin is achieved. The size and purity of the protein products is determined by SDS-PAGE analysis or other suitable method. Alternatively, other methods can be used, such as the Proteus Endotoxin Removal Kit, and accompanying manufacturer's handbook (BIORAD, see, bio-rad-antibodies.com/static/uploads/ifu/pur030.pdf). This step can be repeated until endotoxin reaches desirable levels, typically >0.5 endotoxin units/ml (less than or equal to 0.5 endotoxin units/ml).

[1377] Screening of Purified Proteins

[1378] The purified TNFR1 antagonist molecule candidates are screened to measure binding affinity for the extracellular domain of TNFR1, using methods described above in the detailed description, or methods that are known in the art, such as, for example, immunoassays (e.g., ELISA), surface plasmon resonance (SPR), isothermal titration calorimetry (ITC), or other kinetic interaction assays known in the art. SPR can be performed using several commercially available platforms, such as the BIAcore systems (GE Healthcare Life Sciences), for example. Exemplary assays are described, for example, in Lang et al. (2015) J. Biol Chem 291:5022-5037, which describes and compares the various assays to assess binding affinity. Candidates that are selected include those that have a K_{d} value of <5 nM.

[1379] The TNFR1 antagonists also are screened to determine whether binding to TNFR1 is competitive or non-competitive with respect to TNF, using methods known in the art, such as SPR. If an inhibitor binds to a receptor (e.g., TNFR1) and blocks binding of the ligand (e.g., TNF), for example, by attaching to the active site, this is competitive inhibition, because the inhibitor “competes” with the substrate for the enzyme; that is, only the inhibitor or the substrate can be bound at a given moment. In non-competitive inhibition, the inhibitor does not block the ligand from binding to the ligand-binding site on the receptor. Instead, it attaches at another site and blocks the receptor from responding to bound ligand. This inhibition is said to be “non-competitive” because the inhibitor and substrate can both be bound at the same time. Thus, if ligand is added to the receptor-binding assay at a saturating concentration and it does not inhibit binding of the antibody, then the two molecules are independent and non-competitive. The reverse is also valid. If the two are competitive, then increasing concentrations of the antibody will prevent TNF from binding to the receptor. This is valid whether the binding assays are done on cells, or with receptors or ligands bound to a surface. For exemplary assays, see, e.g., Frey et al. (2001) Current Protocols in Neuroscience, “Receptor Binding Techniques,” available at doi.org/10.1002/0471142301.ns0104s00.

[1380] For example, the ability for TNF to bind human TNFR1 coated on a BIAcore chip first is determined. The TNFR1 surface then is saturated with the TNFR1 antagonist molecule, and TNF subsequently is injected, and the binding of TNF to TNFR1 is re-evaluated. If the binding is non-competitive, they both bind to TNFR1; if it is competitive, they will interfere with each other. If the binding of TNF is unaffected, or only slightly reduced, then binding of the antagonist to TNFR1 is non-competitive with respect to TNF, and if the binding of TNF is abrogated, or significantly reduced, then the binding of the antagonist is considered to be competitive with respect to TNF. For purposes herein, competitive binders are selected.

[1381] The TNFR1 antagonist molecules are further screened to determine their capacity to inhibit TNFR1 signaling in the presence of TNF on cells, using methods known in the art, such as, for example, the method described by McFarlane et al. (2002) FEBS Lett. 515(1-3):119-126, which results in the activation of NFκB-luciferase expression (i.e., a gene reporter assay). Cells used in these experiments do not express TNFR1 or TNFR2 (e.g., the myeloma cell lines AMO1, U266, and L363; see, e.g., Rauert et al. (2011) Cell Death Dis. 2(8):e194), unless transfected with a TNFR1- or TNFR2-expressing plasmid. Alternatively, human cell lines in which TNFR1 and/or TNFR2 genes are inactivated or knocked out using CRISPR vectors, antisense RNA expression, or other methods known in the art, can be used. TNFR1- and/or TNFR2-cell lines, which can be obtained from commercial sources (e.g., Genoway and Synthego), also can be used. These cell lines can then be specifically transfected with TNFR1 and/or TNFR2 expression cassettes. For example, cells expressing TNFR1, TNFR2, or TNFR1 and TNFR2, can be used to assess the selectivity of the antagonists for TNFR1, and to determine the potency of inhibition of TNF signaling via TNFR1.

[1382] To determine the inhibition of TNFR1 signaling by the TNFR1 antagonists, cells expressing human TNFR1 are transiently transfected with a NF-κB-luciferase reporter construct using Lipofectamine, and receptor-stimulated luciferase transcription is measured 48 hours after transfection. Cells stably expressing TNFR1 and NF-κB-luciferase are plated into 24-well plates at a density of 1×10⁵ cells/ml culture media, and incubated until they reach 80% confluency (˜24 hours). The cells then are incubated with 50 ng/ml TNF and varying concentrations of TNFR1 antagonist for 6 hours. NF-κB-stimulated luciferase activity is detected by washing the cells twice with ice-cold PBS, adding 200 μl of ice-cold lysis buffer (25 mM Tris-phosphate pH 7.8, 8 mM MgCl₂, 1 mM DTT, 1% Triton X-100, 15% glycerol), and incubating on ice for 5 min. Cell extracts then are scraped into 1.5 ml Eppendorf tubes, centrifuged to pellet cell debris, and 100 μl of the supernatant is used to measure luciferase induction using a luminometer. The IC₅₀ then is calculated by plotting the relative luminescence units (RLUs) against TNFR1 antagonist concentration, and using a curve fitting software, such as GraphPad Prism. Other similar assays for evaluating the inhibition of TNFR1 signaling include assays that measure the induction of phospho-IκBα, which is indicative of the activation of the classical NF-κB pathway, in cells expressing TNFR1 that are treated with TNF, (see, e.g., Rauert et al. (2011) Cell Death Dis. 2(8):e194).

[1383] TNFR1 antagonist candidates that exhibit inhibition of TNFR1 signaling of at least 80%, and IC₅₀ values approximately equal to the K_{d} (i.e., <5 nM), as determined above, are selected for further optimization.

### Example 2

### Optimization of Selected Candidate Univalent TNFR1 Antagonist Molecules Optimization of Affinity for TNFR1 and Potency of TNFR1 Signaling Inhibition

[1384] Candidate TNFR1 antagonist molecules, which meet the selection criteria outlined above (i.e., high affinity for TNFR1 and potent inhibition of TNFR1 signaling, with K_{d} and IC₅₀ values of <5 nM), are optimized to increase affinity for TNFR1, and potency of TNFR1 signaling inhibition. This is achieved by methods that include one or more of random mutagenesis, site-directed mutagenesis, molecular modeling, and/or error-prone PCR to achieve K_{d} and IC₅₀ values of as low as <1 nM, generally, at least equal to or <100 nM, <50 nM, <10 nM, <or 5 nM. For example, this can be achieved by the method (see, Tiller et al. (2017) Frontiers Immunol. 8:986) in which amino acids most critical to binding are conserved, while the remaining amino acids of the V_{H} domain are subjected to mutagenesis, and a phage library is prepared, and screened for high affinity binding variants for TNFR1, which are selected. In accord with this method, a phage display library to select such variants is produced. In a first step, computational and experimental alanine scanning mutagenesis identifies sites in the complementarity-determining regions (CDRs) that are permissive to mutagenesis while maintaining antigen binding. Next, the most permissive CDR positions are mutated using degenerate codons to encode wild-type residues, and a small number of the most frequently occurring residues at each CDR position, based on natural antibody diversity. This mutagenesis approach results in antibody libraries with variants that have a wide range of numbers of CDR mutations, including antibody domains with single mutations, and others with tens of mutations. In a last step, the libraries (˜10 million variants) displayed on the surface of yeast are sorted to identify CDR mutations with the greatest increases in affinity.

[1385] Half-Life Extension

[1386] Optimized molecules then are linked to a half-life extending moiety, for example, by fusion with IgG Fc domains, particularly modified Fc domains, or human serum albumin (HSA), or by PEGylation, as described above in the detailed description, to achieve an in vivo serum half-life of about 1, 2, 3, 4, 5, 6, 7, 8, 9, 10, or more, days, such as 10-12 days, in SCID mice. The modified molecules then are retested in the in vitro assays described above to ensure that the high affinity binding to TNFR1 and potent inhibition of TNFR1 signaling is retained. Production of successful candidates is scaled-up for further in vitro and in vivo assays.

[1387] In Vitro Assays

[1388] Phagocytosis Assays

[1389] As discussed and described in the detailed description, existing TNF blockers, which inhibit TNFR1 activity, also inhibit TNFR2. TNF blockers have two types of black box warnings from regulatory agencies. The first is susceptibility of anti-TNF (TNF blocker) treated patients to infection. These infections can involve various organ systems and sites due to bacterial, mycobacterial (e.g., tuberculosis), fungal (e.g., histoplasmosis, aspergillosis, candidiasis, coccidioidomycosis, blastomycosis, and pneumocystis), viral (e.g., hepatitis B), and other opportunistic pathogens (organisms that usually do not cause disease in healthy people, but can cause serious illness when a person's immune system (resistance) has weakened). Another issued black box warning is related to pediatric malignancy (see, e.g., online.epocrates.com/u/10b3301/Humira/Black+Box+Warnings). As discussed in the detailed description, this vulnerability results from the total blockade of signaling by TNFR1 and TNFR2 when their ligand, TNF, is blocked. This suppression of innate immunity effect of TNF is mediated by TNFR2 (see, e.g., Ahmad et al. (2018) Front. Immunol. 9:2572), and is primarily mediated by the transmembrane form of TNF, which preferentially activates TNFR2 (see, e.g., Miller et al. (2015) Journal of Immunology 195(6):2633-2647).

[1390] It has been shown that anti-TNF therapeutics, such as adalimumab, infliximab, and etanercept, have an inhibitory effect on IFN-γ-induced phagosome maturation in phorbol myristate acetate-differentiated human THP-1 cells. Adalimumab and infliximab, but not etanercept, suppress phagosome maturation in primary human peripheral blood monocyte-derived macrophages in the presence or absence of IFN-γ (see, e.g., Harris et al. (2008) J. Infect. Dis. 198:1842-1850). In view of the above, an advantage of a specific TNFR1 inhibitor construct is preservation of TNFR2 function, and therefore, macrophage function; macrophages are important in ridding an organism of opportunistic infection. Opportunistic infectious agents include mycobacteria that cause tuberculosis (see, e.g., Fraga et al. (2018) Curr. Issues Mol. Biol. 25:169-198). Macrophage function is disrupted in autoimmune disease in patients treated with TNF blockers. A TNFR1-specific antagonist only inhibits TNFR1 function, thereby avoiding disruption of TNFR2 function, which is needed for normal macrophage function. These TNFR1-specific antagonists can be identified by an assay for anti-TNF effects on macrophage phagocytosis. Among the TNFR1-specific antagonists that are identified, are those that also stimulate TNFR2 function, thus boosting macrophage activity (TNFR1 antagonist and TNFR2 agonist).

Assay to Determine Effects of TNFR1 Antagonists on Macrophage Responses to Mycobacterium tuberculosis Infection

[1391] TNF plays an important role in mediating the inflammatory host response to various pathogens, including Mycobacterium tuberculosis; TNF also plays a role in the immunopathology of tuberculosis (TB). Mycobacterial infection induces the secretion of TNF by macrophages. TNF enhances the ability of macrophages to phagocytose and kill mycobacteria. TNF also stimulates macrophage apoptosis, leading to increased killing and presentation of mycobacterial antigens by dendritic cells. TNF also is required for the formation and maintenance of granulomas; neutralization of TNF in mice chronically infected with M. tuberculosis disrupts the integrity of granulomas, worsening infection and increasing mortality. TNF blockers, such as adalimumab and infliximab, increase the susceptibility to infection with various pathogens, including M. tuberculosis, and increase the risk of reactivation of latent tuberculosis, by suppressing mycobacteria-containing phagosome maturation in human macrophages. Phagosome maturation (i.e., phagosome acidification and fusion with lysosomes) is essential for the presentation of mycobacterial antigens to T-cells, and the initiation of adaptive immune responses (see, e.g., Harris et al. (2008) J. Infect. Dis. 198:1842-1850).

[1392] In order to identify and/or characterize TNFR1 antagonists, the effects of TNFR1 antagonists provided herein on macrophage responses to infection with M. tuberculosis is assessed. Mycobacteria-containing phagosome maturation in human macrophages is analyzed, and compared to phagosome maturation in TNF blockers, such as adalimumab, using the methods described in Harris et al. (2008) J. Infect. Dis. 198:1842-1850. The TNFR1 antagonists that do not increase susceptibility to infection compared to a known TNF blocker, such as adalimumab, are of interest.

[1393] Preparation of THP-1 Cells and Monocyte-Derived Macrophages (MDMs)

[1394] Human THP-1 cells are cultured in RPMI 1640 (Invitrogen) with 10% fetal bovine serum (FBS; Gibco). The cells are differentiated into macrophage-like cells by treatment with 100 nmol/L phorbol myristate acetate (PMA) for 24 hours, and then cultured in normal medium for 3 days. To prepare human monocyte-derived macrophages (MDMs), peripheral blood mononuclear cells (PBMCs) are isolated from the blood of healthy donors using density gradient centrifugation on Histopaque®-1077 (Sigma). Monocytes are isolated by adherence to gelatin-coated culture dishes, and cultured overnight in RPMI 1640 with 5% human AB serum (Sigma). Adherent cells are removed with 10 mmol/L EDTA in PBS, and grown on coverslips in 12-well plates for 10 days. THP-1 cells and MDMs are grown on coverslips at a concentration of 2×10⁵ cells/well.

[1395] Preparation of the Mycobacteria

[1396] Green fluorescent protein (GFP)-labeled Mycobacterium bovis bacillus Calmetter-Guérin (GFP-BCG), and the attenuated M. tuberculosis strain H37Ra and its virulent counterpart, H37Rv, are grown in Middlebrook 7H9 broth with 0.5% Tween, 0.2% glycerol, and 10% albumin-dextrose-catalase supplement (BD). The mycobacteria are grown to log phase before use, and are resuspended in RPMI 1640 with 10% FBS before infection. M. tuberculosis strain H37Ra is fluorescently labeled with PKH67 (Sigma), and strain H37Rv is labeled with fluorescein isothiocyanate (FITC, 1 mg/mL; Sigma), following the manufacturer's protocols.

[1397] Determination of Phagosome Maturation

[1398] Mycobacteria can inhibit the fusion of phagosomes with lysosomes, preventing the acidification and recruitment of lysosomal hydrolases. This blockade of phagosome maturation can be overcome by pre-treating the macrophages with IFN-γ. Treatment of cells infected with mycobacteria with TNF (5 ng/mL) also enhances phagosome acidification. To determine the effects of the TNFR1 antagonist and TNF blockers on the fusion of mycobacterial phagosomes with lysosomes in macrophages, PMA-differentiated THP-1 cells or human peripheral blood MDMs are infected with GFP-BCG, or PKH67-labeled M. tuberculosis strain H37Ra, or FITC-labeled M. tuberculosis strain H37Rv, in the presence of TNFR1 antagonist or TNF blocker, with or without IFN-γ treatment, and phagosome-lysosome fusion is analyzed by confocal microscopy, using LysoTracker® Red (LT) as a marker for acidified phagosomes, and CD63 and cathepsin D as phagolysosomal markers. The inhibition of IFN-γ-induced phagosome maturation/acidification is determined by colocalization of labeled mycobacteria with LysoTracker® Red, CD63 or cathepsin D. For example, a decrease in the percent colocalization of labeled mycobacteria with LT, or with CD63, or with cathepsin D, as compared to the control, is indicative of the inhibition of IFN-γ-induced phagosome acidification.

[1399] TNFR1 antagonist or TNF blocker (e.g., adalimumab, infliximab, etanercept, or others; 10 μg/mL), with or without IFN-γ (200 U/mL), are added to the THP-1 cells or MDMs for 24 hours before infection. As a control, cells are treated with medium only, or with 10 μg/mL human IgG1 from patients with myelomas producing IgG1 (Calbiochem). Cells then are infected with M. bovis GFP-BCG, PKH67-labeled M. tuberculosis H37Ra, or FITC-labeled M. tuberculosis H37Rv for 15 min, washed 3 times with PBS to remove unbound mycobacteria, and incubated for 2 hours. The multiplicity of infection (MOI) is recorded microscopically 15 min after infection of macrophages by acid-fast bacilli staining. Cells are infected at an MOI of 1-5 bacilli in approximately 70% of cells.

[1400] After the 2 hour incubation, cells are fixed in 2% paraformaldehyde for 20 min at room temperature (RT); for strain H37Rv, cells are fixed in 4% paraformaldehyde overnight. Cells are then permeabilized with 0.1% Triton X-100 in PBS, and blocked with 1% bovine serum albumin and 1% goat serum in PBS for 30 min at RT. Cells are incubated with primary antibody (1 μg/mL mouse monoclonal antibody against CD63 (LAMP-3; Santa Cruz Biotechnology); or 10 μg/mL mouse monoclonal antibody against cathepsin D (Calbiochem)) for 1 hour at RT, followed by secondary antibody (4 μg/mL Alexa Fluor 488- or 568-labeled goat anti-mouse IgG; Invitrogen) for 1 hour at RT. Alternatively, prior to fixation, the cells are incubated with LysoTracker® Red DND-99 (100 nmol/L; Invitrogen) for the final 60 min of incubation with the mycobacteria. LysoTracker® Red DND-99 is a red-fluorescent dye for labeling and tracking acidic organelles (such as acidified phagosomes) in live cells.

[1401] The coverslips are mounted onto glass slides with fluorescent mounting medium (Dako), and images are recorded on a laser scanning confocal microscope, such as the Olympus FluoView™ 1000 and Zeiss LSM 510 laser scanning confocal microscope. Images are analyzed and prepared using the appropriate software and Adobe Photoshop.

[1402] Measurement of TNF

[1403] THP-1 cells are prepared as described above and infected with BCG or M. tuberculosis H37Ra, with or without IFN-γ pretreatment. The levels of immunoreactive TNF in supernatants (secreted in response to mycobacterial infection) are measured using a commercial ELISA kit (R&D systems), in accordance with the manufacturer's instructions.

Regulatory T-Cell (Treg Cell) Assays and Cytokine Assays that Distinguish Between TNF Blockade (such as Treatment with Adalimumab, Infliximab, or Etanercept), and Specific TNFR1 Inhibition

[1404] 1. Preservation of FoxP3 Expression

[1405] TNF Blockade (using adalimumab, rituximab, or etanercept) is compared with specific TNFR1 inhibition for methylation of the FoxP3 promoter as a surrogate marker of functional regulatory T-cells. Transgenic mice constitutively expressing human TNFR1 (HuTNFR1) are used to evaluate the differential impact of TNF blockade vs. specific TNFR1 inhibition, on methylation of the FoxP3 promoter. Transgenic mice are prepared by standard methods, and can be prepared by a contractor service or any method, such as by Cyagen, Genoway, or Polygene.

[1406] This effect is assessed in transgenic mice with collagen-induced arthritis (CIA), a widely used model of RA. Mice with C57/BL6N.Q;H-2q/HuTNFR1/Hunt background will be prepared by Genoway or Taconic Labs. Mice will be immunized with bovine type II collagen emulsified in complete Freund's adjuvant (CFA) as described by Tseng et al. ((2019) Proc. Natl. Acad. Sci. U.S.A. 116:21666-21672). Assays for FoxP3 methylation also are performed as described by Tseng et al. ((2019) Proc. Natl. Acad. Sci. U.S.A. 116:21666-21672). Regulatory T-cells from TNF blockade treated mice express lower levels of FoxP3 than regulatory T-cells with specific TNFR1 blockade, as determined by median fluorescence intensity (MFI) and histograms of FoxP3 in CD4⁺CD25⁺ cells.

[1407] 2. Specific Inhibition of TNFR1 vs. TNF Blocker Spares Regulatory T-Cells

[1408] Using the method described by McCann et al. ((2014) Arthritis & Rheumatology 66(10):2728-2738), the number of regulatory T-cells in the lymph node and spleen are compared after treatment of transgenic (C57/BL6N.Q;H-2q/HuTNFR1/Hunt) CIA mice with TNF blocker and with a specific inhibitor of TNFR1.

[1409] 3. Inflammatory Cytokines are Up-Regulated in TNF Blockade vs. Specific TNFR1 Inhibition in Collagen-Induced Arthritis

[1410] Transgenic mice (C57/BL6N.Q;H-2q/HuTNFR1/Hunt) with collagen-induced arthritis (CIA) (see, e.g., McCann et al. (2014) Arthritis & Rheumatology 66(10):2728-2738) are treated with TNF blocker and the TNFR1-specific antagonist. Serum inflammatory cytokines are evaluated (IFN-gamma, IL-12p70, IL-10, RANTES (CCL5); see, e.g., McCann et al. (2014) Arthritis & Rheumatology 66(10):2728-2738). Antagonists that are specific for blocking TNFR1 induce significantly less of one or more of IFN-gamma, IL-12p70, IL-10, or RANTES (CCL5). This results from sparing TNFR2 function and regulatory T-cell function in the spleen and lymph nodes.

### In Vivo Assays

[1411] Studies are performed with humanized (HuTNFR1/HuTNF) transgenic mice. The TNFR1 antagonist molecules are assessed for efficacy in multiple autoimmune disease models. These include the models described above, which express human transgenes for TNFR1 and TNF. Alternative models for autoimmune disease are known. For example, models, including those for RA, are described in detail in Schinnerling et al. ((2019) Front. Immunol 10:203). To establish efficacy, the specific TNFR1 antagonist constructs, as well as other constructs provided herein, are tested in more than one model. Included among the models are at least rheumatoid arthritis (RA), Crohn's disease, and multiple sclerosis (experimental autoimmune encephalitis) models (discussed in the detailed description).

[1412] Inflammatory bowel diseases (IBDs, including ulcerative colitis and Crohn's disease) were the first approved indication for TNF Blockers. Numerous mouse models of these diseases are available and have been described by Mueller ((2002) Immunology 105(1):1-8). As discussed in the detailed description, autoimmune neurodegenerative diseases, including multiple sclerosis (MS) and Alzheimer's disease, are important disease targets. Alzheimer's disease (AD) is the leading cause of dementia worldwide, and represents one of the most serious health issues for the elderly. An estimated 5.4 million Americans have AD, and this number is expected to triple by 2050 if there are no medical breakthroughs to stop, prevent, or slow the disease (see, e.g., Chang et al. (2017) J. Cent. Nerv. Syst. Dis. 9:1179573517709278). Evidence indicates that TNFR1 antagonist constructs and other constructs provided herein are therapeutic candidates, since subjects who have experienced prolonged treatment with TNF blockers are less likely to develop the disease (see, e.g., Chou et al. (2016) CNS Drugs 30:1111). Data show that up-regulated TNF expression is associated with different neurodegenerative diseases and conditions, such as Alzheimer's disease, Parkinson's disease, stroke, and multiple sclerosis (see, e.g., McCoy et al. (2008) J. Neuroinflammation 5(1):45). Existing TNF blockers, however, do not appear to be effective for treating, ameliorating, preventing, or slowing disease progression (see, e.g., Tortarolo et al. (2015) J. Neurochem. 135:109-124). As described herein, various lines of evidence indicate that TNF blockers do not work in such indications because of co-inhibition of TNFR1 and TNFR2; TNFR2 has neuro-protective properties that are lost by treatment with TNF blockers. Others have attempted to approach this problem with various forms of “TNFR1 inhibitors” or “TNFR2 agonists.” None of these studies included cross-reactivity to determine whether TNFR1 or TNFR2 was selectively targeted, as opposed to being one of many epitopes in the body that could be targeted.

[1413] This problem is solved herein. First, a family of anti-TNFR1 antagonists is generated, and tested in the above models, showing that they act as predicted. Then, immunochemistry is used to demonstrate that they are selective. Several contract research laboratories offer this service (e.g., Sino Biological, Inc., and LSBio).

[1414] As discussed in the detailed description, other autoimmune and chronic inflammatory disease states are associated with the presence of TNF. These include type II diabetes and endometriosis. Mouse models of these diseases are known, and HuTNFR1/HuTNF transgenic versions of these mice are used to demonstrate efficacy with the specific anti-TNFR1 antagonists provided herein.

[1415] Acute Respiratory Distress Syndrome

[1416] Viral pathogens of the respiratory tract (e.g., influenza, SARS viruses/coronaviruses) infect respiratory epithelial cells, and tissue-resident alveolar macrophages are the first responders to viral infection in the lung. They effect clearance through the phagocytosis of opsonized viral particles or infected apoptotic cells and the release of a plethora of inflammatory cytokines and chemokines to initiate an immune response (see, e.g., Herold et al. (2015) Eur. Resp. J. 45:1463-1478). TNF blockers have been shown to extend survival of mice infected with influenza (see, e.g., Shi et al. (2013) Crit. Care 17:R301). TNF blockers have been used for treating SARS-Cov 2 (see, e.g., Feldmann et al. (2020) Lancet 395:1407-1409). As described in the detailed description, a known effect of TNF blockers is to reduce regulatory T-cells (Tregs), which is problematic since Tregs are a natural suppressor of inflammation. Thus, a TNFR1-specific inhibitor, that does not interact with TNFR2 or that agonizes TNFR2, as described and provided herein, is superior for this purpose. To test the constructs provided herein, mice are engineered to lack endogenous TNFR1, and to express HuTNFR1/HuTNF. These mice will manifest the acute respiratory distress syndrome induced by HuTNF/HuTNFR1 following infection with influenza (as described in Shi et al. (2013) Crit. Care 17:R301). TNFR1-specific antagonist constructs that do not antagonize TNFR2 are administered. Efficacy is determined by any of several criteria:

[1417] 1. Significantly decreased circulating inflammatory cytokines (e.g., IFN-gamma, IL-1alpha, IL1-beta, and IL-17) vs. a TNF blocker;

[1418] 2. Significantly faster recovery measured by weight gain (see, e.g., Shi et al. (2013) Crit. Care 17:R301), compared to a TNF blocker; and

[1419] 3. Significantly increased survival (see, e.g., Shi et al. (2013) Crit. Care 17:R301), compared to a TNF blocker.

[1420] Transgenic mice that express human TNFR1 and human TNFR2 for use in disease models are generated by standard genetic engineering methods that are known in the art, such as those described by Atretkhany et al. (2018) Proc. Natl. Acad. Sci. U.S.A. 115(51):13051-13056. Particular in vivo assays for various diseases and conditions are as follows. For example, humanized RA mouse models, such as the collagen-induced arthritis (CIA) model of RA, or any other animal models of RA that are known in the art and/or described herein, are used to assess the therapeutic effects of the TNFR1 antagonist molecules provided herein, and compare them to the therapeutic effects of anti-TNF therapies, such as etanercept or adalimumab. The TNFR1 antagonist molecules provided herein, or an anti-TNF therapy, such as etanercept or adalimumab, is administered to the animal daily for a total of 10 days following the onset of clinical arthritis in one or more limbs. The degree of swelling in the initially affected joints is monitored by measuring paw thickness using calipers. Serum is drawn from mice for the measurement of proinflammatory cytokines and chemokines, such as, for example, granulocyte-macrophage colony stimulating factor (GM-CSF), interleukin-10 (IL-10), IL-1β, TL-6, IL-8, RANTES (CCL5) and monocyte chemoattractant protein 1 (MCP-1; also known as CCL2). The regression of RA in the mouse models then is compared between the mice administered the TNFR1 antagonist molecule, and the mice administered etanercept or adalimumab.

[1421] The TNFR1 antagonist molecules provided herein also are tested in humanized mouse models of severe acute respiratory syndrome (SARS), and of viral-induced cytokine storm. Mouse models of SARS are generated, for example, by infecting humanized hTNFR1 (or hTNFR1/hTNFR2) knock-in mice with varying doses, such as 10², 10³, 10⁴, and 10⁵ plaque-forming units (PFUs), of SARS-CoV. The TNFR1 antagonist molecule is administered to the infected mice, and survival is evaluated, and compared to survival of mice administered an anti-TNF therapy, such as adalimumab.

[1422] Viral-induced mouse models of cytokine storm include, for example, lymphocytic choriomeningitis virus (LCMV)-induced models of cytokine storm syndrome (CSS). LCMV-induced mouse models of CSS are generated by administering 2×10⁵ PFUs of LCMV-Armstrong, intraperitoneally to 8-12 week-old Perforin-deficient (Prf^{-/-}) or Prf-Tmem178 double knockout mice. To deplete monocytes/macrophages, 100 μl of clodronate-liposomes are intravenously injected into Prf^{-/-} mice two days prior to the LCMV infection, and 48 and 96 hours later. Alternatively, 1 mg of the neutralizing anti-CSF1 antibody (Clone 5A1, BioXCell) is administered 2 days prior to infection, and 0.5 mg antibody is administered 48 and 96 hours later. Animals are bled via submandibular vein puncture to measure serum cytokines on days 3 and 8 post-infection (see, e.g., Mahajan et al. (2019) J. Autoimmun. 100:62-74).

### Example 3

### Identification and Removal of Immunogenic Sequences

[1423] As described herein, immunogenic sequences, such as B-cell and/or T-cell epitopes, within a protein therapeutic, can negatively impact the activity, efficacy and in vivo half-life of the therapeutic, for example, through the formation of anti-drug antibodies (ADAs) that neutralize the therapeutic and/or expedite its removal from the body. Immunogenic sequences also are detrimental to the safety and tolerability of protein therapeutics, as they can induce undesirable immune responses which result in clinical complications, such as delayed infusion-like allergic reactions, anaphylaxis, and in some cases, life-threatening autoimmunity. As a result, candidate protein therapeutics are screened for immunogenicity, and to remove/replace the identified immunogenic sequences, for example, by mutagenesis, to improve the in vivo efficacy and safety profiles of the therapeutics, and to ensure their success is translated from preclinical studies into the clinic.

[1424] Immunogenic sequences are identified using methods, such as those described in the detailed description, or known to those of skill in the art, including, the use of in silico immunogenicity prediction tools and in vitro immunogenicity testing. For example, as described elsewhere herein, linear B-cell epitopes are predicted using, for example, ABCPred, APCPred, BCPREDs, BepiPred, LBtope, BcePred, EPMLR, BEST, COBEpro, and SVMTriP, or any other available in silico linear B-cell epitope prediction tools described herein and/or known to those of skill in the art. Conformational B-cell epitopes are predicted, using, for example, CEP, DiscoTope, BEpro, ElliPro, SEPPA, CBTOPE, EPITOPIA, EPCES, EPSVR, EPMeta, PEASE, EpiPred, 3DEX, PEPOP, PEPOP 2.0, and EpiSearch, or any other available in silico conformational B-cell epitope prediction tools described herein and/or known to those of skill in the art. T-cell epitopes are predicted using, for example, EpiMatrix, JanusMatrix, IEDB, SYFPEITHI, MHC Thread, MHCPred, MHCPred 2.0, EpiJen, NetMHC, NetCTL, nHLAPred, SVMHC, ProPred, MMBPred, Protean 3D, and Bimas, or any other available in silico T-cell epitope prediction tools described herein and/or known in the art. The following is an exemplary analysis of the human TNFR1 antagonist DMS5541 sequence (SEQ ID NO:38) for immunogenic, linear B-cell epitopes.

[1425] Analysis of DMS5541 for Immunogenic Linear B-Cell Epitopes

[1426] The sequence of the human TNFR1 antagonist DMS5541 (SEQ ID NO:38) was analyzed for potential immunogenicity using the SVMTriP algorithm to detect linear B-cell epitopes within the molecule. The algorithm identified three possible epitopes in the sequence of DMS5541, as shown in Table 13, below. The results indicate that the epitope with the sequence AVKGRFTISRDNSKNTLYLQ, corresponding to residues 63-82 of SEQ ID NO:38, has a high probability for immunogenicity. The three epitopes identified then are tested for immunogenicity in an in vitro B-cell assay. Any sequences that are positive for immunogenicity are subjected to an alanine scan. The positive amino acids/sequences are modified, by substitution of each amino acid in the sequence with an alanine residue, one by one, until the immunogenic epitope is destroyed. This generates a TNFR1 antagonist that is safer and more effective.

[1427] As a positive control, the SVMTriP algorithm also was used to predict the known high immunogenicity of adalimumab; adalimumab administered without methotrexate is immunogenic in approximately 50% of patients (see, e.g., Ducourau et al. (2020) RMD Open 6:e001047). The SVMTriP algorithm identified at least ten possible epitopes in the heavy chain of adalimumab, four of which are at a high probability, thus correlating well with the clinical data and validating the use of this program for predicting immunogenicity.

TABLE 13
B-cell Epitopes in DMS5541 Sequence
as Predicted by SVMTriP Algorithm

| | | Location | |
|---|---|---|---|
| | | (SEQ ID | |
| Rank | Epitope | NO: 38) | Score |
| 1 | AVKGRFTISRDNSKNTLYLQ | 63-82 | 1.000 |
| 2 | LRAEDTAVYYCAIYTGRWVP | 86-105 | 0.784 |
| 3 | SPSSLSASVGDRVTITCRAS | 129-148 | 0.660 |

[1428] The results from the SVMTriP analysis of DMS5541 are supported by a second algorithm, ABCPred, which was used to predict immunogenicity within the sequence of DMS5541. All three B-cell epitopes predicted by SVMTriP also were included in the epitope prediction results of ABCPred. For example, as shown in Table 14, below, the epitopes AVKGRFTISRDNSKNT, TGRWVPFEYWGQGTLV and STDIQMTQSPSSLSAS (see Table below for residue positions of each in SEQ ID 38) contain sequences that overlap with the three epitopes identified by SVMTriP.

TABLE 14
B-cell Epitopes in DMS5541 Sequence as
Predicted by ABCPred Prediction Server

| | | Starting | |
|---|---|---|---|
| | | Position | |
| | | (SEQ ID | |
| Rank | Epitope | NO: 38) | Score |
| 1 | AQAGTHPTTFGQGTKV | 211 | 0.92 |
| 2 | SGSGTDFTLTISSLQP | 187 | 0.90 |
| 3 | AVKGRFTISRDNSKNT | 63 | 0.89 |
| 3 | RVTITCRASRPIGTTL | 140 | 0.89 |
| 4 | SASVGDRVTITCRASR | 134 | 0.86 |
| 5 | GWVRQAPGKGLEWVSQ | 35 | 0.85 |
| 6 | ASRPIGTTLSWYQQKP | 147 | 0.84 |
| 7 | LVTVSSASTDIQMTQS | 114 | 0.83 |
| 8 | SGFTFDKYSMGWVRQA | 25 | 0.82 |
| 8 | LQPEDFATYYCAQAGT | 200 | 0.82 |
| 9 | QISDTADRTYYAHAVK | 50 | 0.81 |
| 9 | STDIQMTQSPSSLSAS | 121 | 0.81 |
| 10 | NSKNTLYLQMNSLRAE | 74 | 0.80 |
| 10 | TGRWVPFEYWGQGTLV | 100 | 0.80 |

### Example 4

### Exemplary TNFR1 Antagonist Constructs that Contain Human TNFR1 Antagonist Antibody Fragments (dAbs, scFvs, Fabs)

[1429] Provided herein is a TNFR1 antagonist construct that selectively inhibits TNFR1, without inhibiting TNFR2. To avoid TNFR1 receptor clustering, which agonizes TNFR1, the TNFR1 antagonist is monomeric and monovalent. The TNFR1 antagonist contains a human single domain antibody (dAb) that is specific for TNFR1. The dAb contains a variable region heavy chain (V_{H}) or a variable region light chain (V_{L}) domain. For example, the dAb contains any of the dAbs whose amino acid sequences are set forth in any one of SEQ ID NOs: 54-672, or a dAb with at least or at least about 90% or 95% sequence identity to the dAb of any of SEQ ID NOs: 54-672, that retains binding affinity for TNFR1. Alternatively, the TNFR1 antagonist contains an scFv, a Fab, or other antigen-binding fragment, such as those derived from a human TNFR1 antagonist antibody, such as H398 or ATROSAB. For example, the TNFR1 antagonist contains the H398-derived scFv set forth in SEQ ID NO: 677 or 678; or the ATROSAB-derived scFvs set forth in any one of SEQ ID NOs: 673-676; or the ATROSAB-derived Fab fragment light and heavy chains set forth in any of SEQ ID NOs: 679 and 680, respectively (FabATR), or SEQ ID NOs: 681 or 682, respectively (Fab 13.7); or an scFv or Fab fragment with at least or at least about 90% or 95% sequence identity to the scFvs of any of SEQ ID NOs: 673-678, or the Fab light and heavy chains of any of sequence ID NOs: 679 and 680, respectively (FabATR), or SEQ ID NOs: 681 or 682, respectively (Fab 13.7), and that retain the affinity for TNFR1.

[1430] The TNFR1 antagonist is fused to a serum half-life extender, such as an IgG Fc, particularly an Fc modified to eliminate or reduce ADCC, ADCP, and/or CDC, human serum albumin (HSA), and/or a poly(ethylene)glycol (PEG) molecule. For example, the C-terminus of the human anti-TNFR1 dAb, scFV, Fab or other antigen-binding fragment, is fused with the N-terminus of the Fc region of a human IgG1 or IgG4 antibody via a linker. An IgG1 Fc region, such as the IgG1 Fc derived from trastuzumab (see, SEQ ID NO:27), or an IgG4 Fc region, such as the IgG4 Fc derived from nivolumab (see, SEQ ID NO:30), is used. The linker includes a portion of the hinge sequence of trastuzumab, containing the sequence of amino acid residues SCDKTH (corresponding to residues 222-227 of SEQ ID NO:26), when the Fc is derived from trastuzumab, or can contain the hinge sequence of nivolumab, containing the sequence of amino acid residues ESKYGPPCPPCP (corresponding to residues 212-223 of SEQ ID NO:29), or a portion thereof that provides flexibility or other structural property, when the Fc is derived from nivolumab. To confer protease resistance and to increase the flexibility of the fusion protein, the SCDKTH or ESKYGPPCPPCP hinge sequence is replaced with a short glycine-serine (GS) peptide linker, such as, for example, (GSGS) or (GGGGS)ₙ (see, e.g., residues 199-202, and 116-120 of SEQ ID NO:707, respectively), where n=1-5 or 1-6, or other combination of Gly and Ser residues, such as, for example, GGGGSGGGGSGGGGS (e.g. residues 116-130 or SEQ ID NO:707). In other embodiments, the C-terminus of the human anti-TNFR1 dAb, scFv, Fab or other antigen-binding fragment, is linked to the GS linker, and the GS linker is connected to all or a portion, sufficient to provide flexibility, of the trastuzumab or nivolumab hinge sequence, which is connected to the N-terminus of the corresponding Fc region. In some embodiments, a second Fc subunit, is linked to the first Fc subunit, to increase the serum half-life and stability of the molecule. Because there are two Fc regions, any resulting construct is not a fusion protein since it contains one non-contiguous Fc region. In some embodiments, the N-terminus of the human TNFR1 antagonistic dAb, scFV, Fab or other antigen-binding fragment, is fused to the C-terminus of the serum half-life extender via a linker, as described above.

[1431] Also provided herein are TNFR1 antagonist fusion proteins that contain an anti-TNFR1 dAb, scFv, Fab, or other antigen-binding fragment, fused with human serum albumin (HSA), via a short peptide linker, such as (GSGS)ₙ or (GGGGS)ₙ, where n=1-5 or 6, such as, for example, GGGGSGGGGSGGGGS.

[1432] Also provided herein are TNFR1 antagonist molecules that contain an anti-TNFR1 dAb, scFv, Fab, or other antigen-binding fragment, linked to a PEG molecule that is at least 30 kDa in size.

[1433] As described herein, these constructs can be modified to reduce or eliminate immunogenicity. The TNFR1 antagonist dAb, scFv, Fab, or other antigen-binding fragment is analyzed by in silico, in vitro and/or in vivo methods to predict or identify immunogenic sequences. Upon identification of immunogenic sequences, such as B-cell and/or T-cell epitopes, the identified sequences are modified by mutagenesis, for example, by alanine scanning, as described elsewhere herein, to de-immunize the epitopes/remove or replace the immunogenic sequences.

[1434] The following are exemplary constructs of the TNFR1 antagonist fusion proteins described and provided herein. In all embodiments that include the Fc of trastuzumab or the Fc of nivolumab, the Fc regions optionally are modified to reduce or eliminate immune effector functions, including ADCC, ADCP, and CDC, and also, optionally are modified to enhance binding to FcRn, increasing the serum half-life of the fusion proteins, and also to optionally replace or otherwise modify or remove immunogenic sequences.

[1435] Fc modifications that reduce or eliminate immune effector functions are summarized in Table 9, above, and Fc modifications that enhance FcRn binding are summarized in Table 7, above. Any one or a combination of such modifications is/are included in the Fc regions of the fusion proteins provided herein. All of the exemplary constructs provided herein also are prepared with the TNFR1 antagonist at the C terminus of the fusion protein, instead of at the N-terminus.

[1436] 1a) H398 scFv-SCDKTH-Trastuzumab Fc

[1437] Provided herein is a human TNFR1 antagonist fusion protein, containing an scFv derived from the human TNFR1 antagonist antibody H398. The scFv contains the V_{L} and V_{H} domains of H398, linked together by a (GGGGS)₃ peptide linker. The C-terminus of the H398 scFv (SEQ ID NO:678) is fused to a portion of the hinge sequence of trastuzumab, that contains at least the sequence of amino acid residues SCDKTH (corresponding to residues 222-227 of SEQ ID NO:26), which is fused to the N-terminus of the trastuzumab Fc region (corresponding to residues 234-450 of SEQ ID NO:26; see also SEQ ID NO:27). The H398 scFv-SCDKTH-trastuzumab Fc fusion protein has the following sequence (SEQ ID NO:706):

QVQLQESGAELARPGASVKLSCKASGYTFTDFYINW
VKQRTGQGLEWIGEIYPYSGHAYYNEKFKAKATLT
ADKSSSTAFMQLNSLTSEDSAVYFCVRWDFLDYWG
QGTTLTVSSGGGGSGGGGSGGGGSDIVMTQSPLSL
PVSLGDQASISCRSSQSLLHSNGNTYLHWYVQKPG
QSPKLLIYTVSNRFSGVPDRFSGSGSGTDFTLKIS
RVEAEDLGVYFCSQSTHVPYTFGGGTKLEIKRSCD
KTHAPELLGGPSVFLFPPKPKDTLMISRTPEVTCV
VVDVSHEDPEVKFNWYVDGVEVHNAKTKPREEQYN
STYRVVSVLTVLHQDWLNGKEYKCKVSNKALPAPI
EKTISKAKGQPREPQVYTLPPSREEMTKNQVSLTC
LVKGFYPSDIAVEWESNGQPENNYKTTPPVLDSDG
SFFLYSKLTVDKSRWQQGNVFScSVMHEALHNHYT
QKSLSLSPGK

[1438] Alternatively, the SCDKTH hinge sequence is replaced by up to the full sequence of the hinge region of trastuzumab, that contains or has the sequence EPKSCDKTHTCPPCP (corresponding to residues 219-233 of SEQ ID NO:26), or at least 5, 6, 7, 8, 9, 10, or 11 contiguous residues thereof.

[1439] 1b) H398 scFv-GGGGSGGGGSGGGGS-Trastuzumab Fc

[1440] Provided herein is a TNFR1 antagonist fusion protein, containing an scFv derived from the human TNFR1 antagonist antibody H398. The scFv contains the V_{L} and V_{H} domains of H398, linked together by a (GGGGS)₃ peptide linker. The C-terminus of the H398 scFv (SEQ ID NO:678) is fused to a GGGGSGGGGSGGGGS peptide linker, which is fused to the N-terminus of the trastuzumab Fc region (corresponding to residues 234-450 of SEQ ID NO: 26; see also SEQ ID NO:27). The H398 scFv-GGGGSGGGGSGGGGS-Trastuzumab Fc fusion protein has the following sequence (SEQ ID NO:707):

QVQLQESGAELARPGASVKLSCKASGYTFTDFYIN
WVKQRTGQGLEWIGEIYPYSGHAYYNEKFKAKATL
TADKSSSTAFMQLNSLTSEDSAVYFCVRWDFLDYW
GQGTTLTVSSGGGGSGGGGSGGGGSDIVMTQSPLS
LPVSLGDQASISCRSSQSLLHSNGNTYLHWYVQKP
GQSPKLLIYTVSNRFSGVPDRFSGSGSGTDFTLKI
SRVEAEDLGVYFCSQSTHVPYTEGGGTKLEIKRGG
GGSGGGGSGGGGSAPELLGGPSVFLEPPKPKDTLM
ISRTPEVTCVVVDVSHEDPEVKFNWYVDGVEVHNA
KTKPREEQYNSTYRVVSVLTVLHQDWLNGKEYKCK
VSNKALPAPIEKTISKAKGQPREPQVYTLPPSREE
MTKNQVSLTCLVKGFYPSDIAVEWESNGQPENNYK
TTPPVLDSDGSFFLYSKLTVDKSRWQQGNVFSCSV
MHEALHNHYTQKSLSLSPGK

[1441] Alternatively, the GGGGSGGGGSGGGGS linker is replaced by a Gly-Ser linker, such as (GSGS)ₙ or (GGGGS)ₙ linker, where n=1, 2, 3, 4 or 5, or any other suitable short peptide linker as described herein or as known in the art.

[1442] 1c) H398 scFv-GGGGSGGGGSGGGGS-SCDKTH-Trastuzumab Fc

[1443] Provided herein is a TNFR1 antagonist fusion protein, containing an scFv derived from the human TNFR1 antagonist antibody H398. The scFv contains the V_{L} and V_{H} domains of H398, linked together by a (GGGGS)₃ peptide linker. The C-terminus of the H398 scFv (SEQ ID NO:678) is fused to a GGGGSGGGGSGGGGS peptide linker, which is fused to a portion of the hinge sequence of trastuzumab, including at least the sequence of amino acid residues SCDKTH (corresponding to residues 222-227 of SEQ ID NO:26), which is fused to the N-terminus of the trastuzumab Fc region (corresponding to residues 234-450 of SEQ ID NO: 6; see also SEQ ID NO:27). The H398 scFv-GGGGSGGGGSGGGGS-SCDKTH-Trastuzumab Fc fusion protein has the following sequence (SEQ ID NO:708):

QVQLQESGAELARPGASVKLSCKASGYTFTDFYIN
WVKQRTGQGLEWIGEIYPYSGHAYYNEKFKAKATL
TADKSSSTAFMQLNSLTSEDSAVYFCVRWDFLDYW
GQGTTLTVSSGGGGSGGGGSGGGGSDIVMTQSPLS
LPVSLGDQASISCRSSQSLLHSNGNTYLHWYVQKP
GQSPKLLIYTVSNRFSGVPDRFSGSGSGTDFTLKI
SRVEAEDLGVYFCSQSTHVPYTEGGGTKLEIKRGG
GGSGGGGSGGGGSSCDKTHAPELLGGPSVFLEPPK
PKDTLMISRTPEVTCVVVDVSHEDPEVKFNWYVDG
VEVHNAKTKPREEQYNSTYRVVSVLTVLHQDWLNG
KEYKCKVSNKALPAPIEKTISKAKGQPREPQVYTL
PPSREEMTKNQVSLTCLVKGFYPSDIAVEWESNGQ
PENNYKTTPPVLDSDGSFFLYSKLTVDKSRWQQGN
VFSCSVMHEALHNHYTQKSLSLSPGK

[1444] Alternatively, the GGGGSGGGGSGGGGS linker is replaced by a Gly-Ser linker, such as (GSGS)ₙ or (GGGGS)ₙ linker, where n=1, 2, 3, 4 or 5, or any other suitable short peptide linker, as described herein or as known in the art. Alternatively, or additionally, the SCDKTH hinge sequence is replaced by up to the full sequence of the hinge region of trastuzumab, containing at least 5, 6, 7, 8, 9, 10, or 11 contiguous residues of the sequence EPKSCDKTHTCPPCP (corresponding to residues 219-233 of SEQ ID NO:26).

[1445] 1d) H398 scFv-GGGGSGGGGSGGGGS-HSA

[1446] Provided herein is a TNFR1 antagonist fusion protein, containing an scFv derived from the human TNFR1 antagonist antibody H398. The scFv contains the V_{L} and V_{H} domains of H398, linked together by a (GGGGS)₃ peptide linker. The C-terminus of the H398 scFv (SEQ ID NO:678) is fused to a GGGGSGGGGSGGGGS peptide linker, which is fused to the N-terminus of human serum albumin (HSA) without the signal peptide (corresponding to residues 19-609 of SEQ ID NO:35). The H398 scFv-GGGGSGGGGSGGGGS-HSA fusion protein has the following sequence (SEQ ID NO:709):

QVQLQESGAELARPGASVKLSCKASGYTFTDFYIN
WVKQRTGQGLEWIGEIYPYSGHAYYNEKFKAKATL
TADKSSSTAFMQLNSLTSEDSAVYFCVRWDFLDYW
GQGTTLTVSSGGGGSGGGGSGGGGSDIVMTQSPLS
LPVSLGDQASISCRSSQSLLHSNGNTYLHWYVQKP
GQSPKLLIYTVSNRFSGVPDRFSGSGSGTDFTLKI
SRVEAEDLGVYFCSQSTHVPYTFGGGTKLEIKRGG
GGSGGGGSGGGGSRGVFRRDAHKSEVAHREKDLGE
ENFKALVLIAFAQYLQQCPFEDHVKLVNEVTEFAK
TCVADESAENCDKSLHTLFGDKLCTVATLRETYGE
MADCCAKQEPERNECFLQHKDDNPNLPRLVRPEVD
VMCTAFHDNEETFLKKYLYEIARRHPYFYAPELLF
FAKRYKAAFTECCQAADKAACLLPKLDELRDEGKA
SSAKQRLKCASLQKFGERAFKAWAVARLSQRFPKA
EFAEVSKLVTDLTKVHTECCHGDLLECADDRADLA
KYICENQDSISSKLKECCEKPLLEKSHCIAEVEND
EMPADLPSLAADFVESKDVCKNYAEAKDVFLGMFL
YEYARRHPDYSVVLLLRLAKTYETTLEKCCAAADP
HECYAKVEDEFKPLVEEPQNLIKQNCELFEQLGEY
KFQNALLVRYTKKVPQVSTPTLVEVSRNLGKVGSK
CCKHPEAKRMPCAEDYLSVVLNQLCVLHEKTPVSD
RVTKCCTESLVNRRPCFSALEVDETYVPKEFNAET
FTFHADICTLSEKERQIKKQTALVELVKHKPKATK
EQLKAVMDDFAAFVEKCCKADDKETCFAEEGKKLV
AASQAALGL

[1447] Alternatively, the GGGGSGGGGSGGGGS linker is replaced by a Gly-Ser linker, such as a (GSGS)ₙ or a (GGGGS)ₙ linker, where n=1, 2, 3, 4 or 5, or any other suitable short peptide linker, as described herein, or as known in the art.

[1448] 1e) H398 scFv-GGGGSGGGGSGGGGS-PEG_{30 kDa}

[1449] Provided herein is a TNFR1 antagonist fusion protein, containing an scFv derived from the human TNFR1 antagonist antibody H398. The scFv contains the V_{L} and V_{H} domains of H398, linked together by a (GGGGS)₃ peptide linker. The C-terminus of the H398 scFv (SEQ ID NO:678) is fused to a GGGGSGGGGSGGGGS peptide linker, which is covalently linked to a PEG molecule of 30 kDa in size.

[1450] Alternatively, the GGGGSGGGGSGGGGS linker is replaced by a Gly-Ser linker, such as a (GSGS)ₙ or a (GGGGS)ₙ linker, where n=1, 2, 3, 4 or 5, or any other suitable short peptide linker as described herein or as known in the art. Alternatively or additionally, the PEG molecule can have a molecular weight of equal to about 30 kDa, or more than 30 kDa, such as, for example, 35 kDa, 40 kDa, 45 kDa, or 50 kDa.

[1451] 1f) DOM1h-574-16-SCDKTH-Trastuzumab Fc

[1452] Provided herein is a TNFR1 antagonist fusion protein, containing the human TNFR1 antagonist dAb DOM1h-574-16 (SEQ ID NO:57). The C-terminus of DOM1h-574-16 is fused to a portion of the hinge sequence of trastuzumab, containing at least the sequence of amino acid residues SCDKTH (corresponding to residues 222-227 of SEQ ID NO:26), which is fused to the N-terminus of the trastuzumab Fc region (corresponding to residues 234-450 of SEQ ID NO: 26; see also SEQ ID NO:27). The DOMlh-574-16-SCDKTH-Trastuzumab Fc fusion protein has the following sequence (SEQ ID NO:710):

EVQLLESGGGLVQPGGSLRLSCAASGETFVKYSMG
WVRQAPGKGPEWVSQISNTGDRTYYADSVKGRFTI
SRDNSKNTLYLQMNSLRAEDTAVYYCAIYTGRWEP
FDYWGQGTLVTVSSSCDKTHAPELLGGPSVFLEPP
KPKDTLMISRTPEVTCVVVDVSHEDPEVKFNWYVD
GVEVHNAKTKPREEQYNSTYRVVSVLTVLHQDWLN
GKEYKCKVSNKALPAPIEKTISKAKGQPREPQVYT
LPPSREEMTKNQVSLTCLVKGFYPSDIAVEWESNG
QPENNYKTTPPVLDSDGSFFLYSKLTVDKSRWQQG
NVFSCSVMHEALHNHYTQKSLSLSPGK

[1453] Alternatively, the SCDKTH hinge sequence is replaced by up to the full sequence of the hinge region of trastuzumab, containing the sequence EPKSCDKTHTCPPCP (corresponding to residues 219-233 of SEQ ID NO:26), or at least 5, 6, 7, 8, 9, 10, or 11 contiguous residues thereof.

[1454] 1g) DOM1h-574-16-GGGGSGGGGSGGGGS-Trastuzumab Fc

[1455] Provided herein is a TNFR1 antagonist fusion protein, containing the human TNFR1 antagonist dAb DOM1h-574-16 (SEQ ID NO:57). The C-terminus of DOM1h-574-16 is fused to a GGGGSGGGGSGGGGS peptide linker, which is fused to the N-terminus of the trastuzumab Fc region (corresponding to residues 234-450 of SEQ ID NO:26; see also SEQ ID NO:27). The DOM1h-574-16-GGGGSGGGGSGGGGS-Trastuzumab Fc fusion protein has the following sequence (SEQ ID NO:711):

EVQLLESGGGLVQPGGSLRLSCAASGETFVKYSMG
WVRQAPGKGPEWVSQISNTGDRTYYADSVKGRETI
SRDNSKNTLYLQMNSLRAEDTAVYYCAIYTGRWEP
FDYWGQGTLVTVSSGGGGSGGGGSGGGGSAPELLG
GPSVFLFPPKPKDTLMISRTPEVTCVVVDVSHEDP
EVKFNWYVDGVEVHNAKTKPREEQYNSTYRVVSVL
TVLHQDWLNGKEYKCKVSNKALPAPIEKTISKAKG
QPREPQVYTLPPSREEMTKNQVSLTCLVKGFYPSD
IAVEWESNGQPENNYKTTPPVLDSDGSFELYSKLT
VDKSRWQQGNVFSCSVMHEALHNHYTQKSLSLSPG
K

[1456] Alternatively, the GGGGSGGGGSGGGGS linker is replaced by a Gly-Ser linker, such as a (GSGS)ₙ or a (GGGGS)ₙ linker, where n=1, 2, 3, 4 or 5, or any other suitable short peptide linker, as described herein or as known in the art.

[1457] 1h) DOM1h-574-16-GGGGSGGGGSGGGGS-SCDKTH-Trastuzumab Fc

[1458] Provided herein is a TNFR1 antagonist fusion protein, containing the human TNFR1 antagonist dAb DOM1h-574-16 (SEQ ID NO:57). The C-terminus of DOM1h-574-16 is fused to a GGGGSGGGGSGGGGS peptide linker, which is fused to a portion of the hinge sequence of trastuzumab, containing the at least sequence of residues SCDKTH (corresponding to residues 222-227 of SEQ ID NO:26), which is fused to the N-terminus of the trastuzumab Fc region (corresponding to residues 234-450 of SEQ ID NO:26; see also SEQ ID NO:27). The DOM1h-574-16-GGGGSGGGGSGGGGS-SCDKTH-Trastuzumab Fc fusion protein has the following sequence (SEQ ID NO:712):

EVQLLESGGGLVQPGGSLRLSCAASGFTFVKYSMG
WVRQAPGKGPEWVSQISNTGDRTYYADSVKGRFTI
SRDNSKNTLYLQMNSLRAEDTAVYYCAIYTGRWEP
FDYWGQGTLVTVSSGGGGSGGGGSGGGGSSCDKTH
APELLGGPSVFLFPPKPKDTLMISRTPEVTCVVVD
VSHEDPEVKFNWYVDGVEVHNAKTKPREEQYNSTY
RVVSVLTVLHQDWLNGKEYKCKVSNKALPAPIEKT
ISKAKGQPREPQVYTLPPSREEMTKNQVSLTCLVK
GFYPSDIAVEWESNGQPENNYKTTPPVLDSDGSFF
LYSKLTVDKSRWQQGNVFSCSVMHEALHNHYTQKS
LSLSPGK

[1459] Alternatively, the GGGGSGGGGSGGGGS linker is replaced by a Gly-Ser linker, such as (GSGS)ₙ or (GGGGS)ₙ linker, where n=1, 2, 3, 4 or 5, or any other suitable short peptide linker as described herein or as known in the art. Alternatively or additionally, the SCDKTH hinge sequence is replaced by up to the full sequence of the hinge region of trastuzumab, containing the sequence EPKSCDKTHTCPPCP (corresponding to residues 219-233 of SEQ ID NO:26), or at least 5, 6, 7, 8, 9, 10, or 11 residues contiguous thereof.

[1460] 1i) DOM1h-574-16-GGGGSGGGGSGGGGS-HSA

[1461] Provided herein is a TNFR1 antagonist fusion protein, containing the human TNFR1 antagonist dAb DOM1h-574-16 (SEQ ID NO:57). The C-terminus of DOM1h-574-16 is fused to a GGGGSGGGGSGGGGS peptide linker, which is fused to the N-terminus of human serum albumin (HSA) without the signal peptide (corresponding to residues 19-609 of SEQ ID NO:35). The DOM1h-574-16-GGGGSGGGGSGGGGS-HSA fusion protein has the following sequence (SEQ ID NO:713):

EVQLLESGGGLVQPGGSLRLSCAASGETFVKYSMG
WVRQAPGKGPEWVSQISNTGDRTYYADSVKGRFTI
SRDNSKNTLYLQMNSLRAEDTAVYYCAIYTGRWEP
FDYWGQGTLVTVSSGGGGSGGGGSGGGGSRGVERR
DAHKSEVAHREKDLGEENFKALVLIAFAQYLQQCP
FEDHVKLVNEVTEFAKTCVADESAENCDKSLHTLF
GDKLCTVATLRETYGEMADCCAKQEPERNECFLQH
KDDNPNLPRLVRPEVDVMCTAFHDNEETFLKKYLY
EIARRHPYFYAPELLFFAKRYKAAFTECCQAADKA
ACLLPKLDELRDEGKASSAKQRLKCASLQKFGERA
FKAWAVARLSQRFPKAEFAEVSKLVTDLTKVHTEC
CHGDLLECADDRADLAKYICENQDSISSKLKECCE
KPLLEKSHCIAEVENDEMPADLPSLAADFVESKDV
CKNYAEAKDVFLGMFLYEYARRHPDYSVVLLLRLA
KTYETTLEKCCAAADPHECYAKVFDEFKPLVEEPQ
NLIKQNCELFEQLGEYKFQNALLVRYTKKVPQVST
PTLVEVSRNLGKVGSKCCKHPEAKRMPCAEDYLSV
VLNQLCVLHEKTPVSDRVTKCCTESLVNRRPCFSA
LEVDETYVPKEFNAETFTFHADICTLSEKERQIKK
QTALVELVKHKPKATKEQLKAVMDDFAAFVEKCCK
ADDKETCFAEEGKKLVAASQAALGL

[1462] Alternatively, the GGGGSGGGGSGGGGS linker is replaced by a Gly-Ser linker, such as a (GSGS)ₙ or a (GGGGS)ₙ linker, where n=1, 2, 3, 4 or 5, or any other suitable short peptide linker as described herein or as known in the art.

[1463] 1j) DOM1h-574-16-GGGGSGGGGSGGGGS-PEG30 kDa

[1464] Provided herein is a TNFR1 antagonist fusion protein, containing the human TNFR1 antagonist dAb DOM1h-574-16 (SEQ ID NO:57). The C-terminus of DOM1h-574-16 is fused to a GGGGSGGGGSGGGGS peptide linker, which is covalently linked to a PEG molecule of 30 kDa in size.

[1465] Alternatively, the GGGGSGGGGSGGGGS linker is replaced by a Gly-Ser linker, such as a (GSGS)ₙ or a (GGGGS)ₙ linker, where n=1, 2, 3, 4 or 5, or any other suitable short peptide linker as described herein or as known in the art. Alternatively or additionally, the PEG molecule can have a molecular weight of more than 30 kDa, such as, for example, 35 kDa, 40 kDa, 45 kDa, or 50 kDa.

[1466] 1k) DOM1h-549-SCDKTH-Trastuzumab Fc

[1467] Provided herein is a TNFR1 antagonist fusion protein, containing the human TNFR1 antagonist dAb DOM1h-549 (SEQ ID NO:58). The C-terminus of DOM1h-549 is fused to a portion of the hinge sequence of trastuzumab, containing at least the sequence of residues SCDKTH (corresponding to residues 222-227 of SEQ ID NO:26), which is fused to the N-terminus of the trastuzumab Fc region (corresponding to residues 234-450 of SEQ ID NO:26; see, also, SEQ ID NO:27). The DOM1h-549-SCDKTH-Trastuzumab Fc fusion protein has the following sequence (SEQ ID NO:714):

EVQLLESGGGLVQPGGSLRLSCAASGFTFVDYEMH
WVRQAPGKGLEWVSSISESGTTTYYADSVKGRFTI
SRDNSKNTLYLQMNSLRAEDTAVYYCAKRRFSAST
FDYWGQGTLVTVSSSCDKTHAPELLGGPSVFLFPP
KPKDTLMISRTPEVTCVVVDVSHEDPEVKFNWYVD
GVEVHNAKTKPREEQYNSTYRVVSVLTVLHQDWLN
GKEYKCKVSNKALPAPIEKTISKAKGQPREPQVYT
LPPSREEMTKNQVSLTCLVKGFYPSDIAVEWESNG
QPENNYKTTPPVLDSDGSFFLYSKLTVDKSRWQQG
NVFSCSVMHEALHNHYTQKSLSLSPGK

[1468] Alternatively, the SCDKTH hinge sequence is replaced by the up to the full sequence of the hinge region of trastuzumab, containing the sequence EPKSCDKTHTCPPCP (corresponding to residues 219-233 of SEQ ID NO:26), or at least 5, 6, 7, 8, 9, 10, or 11 contiguous residues thereof.

[1469] 1l) DOM1h-549-GGGGSGGGGSGGGGS-Trastuzumab Fc

[1470] Provided herein is a TNFR1 antagonist fusion protein, containing the human TNFR1 antagonist dAb DOM1h-549 (SEQ ID NO:58). The C-terminus of DOMlh-549 is fused to a GGGGSGGGGSGGGGS peptide linker, which is fused to the N-terminus of the trastuzumab Fc region (corresponding to residues 234-450 of SEQ ID NO:26; see, also, SEQ ID NO:27). The DOM1h-549-GGGGSGGGGSGGGGS-Trastuzumab Fc fusion protein has the following sequence SE ID NO:715):

EVQLLESGGGLVQPGGSLRLSCAASGETFVDYEMH
WVRQAPGKGLEWVSSISESGTTTYYADSVKGRFTI
SRDNSKNTLYLQMNSLRAEDTAVYYCAKRRFSAST
FDYWGQGTLVTVSSGGGGSGGGGSGGGGSAPELLG
GPSVFLFPPKPKDTLMISRTPEVTCVVVDVSHEDP
EVKFNWYVDGVEVHNAKTKPREEQYNSTYRVVSVL
TVLHQDWLNGKEYKCKVSNKALPAPIEKTISKAKG
QPREPQVYTLPPSREEMTKNQVSLTCLVKGFYPSD
IAVEWESNGQPENNYKTTPPVLDSDGSFFLYSKLT
VDKSRWQQGNVFSCSVMHEALHNHYTQKSLSLSPG
K

[1471] Alternatively, the GGGGSGGGGSGGGGS linker is replaced by a Gly-Ser linker, such as a (GSGS)ₙ or a (GGGGS)ₙ linker, where n=1, 2, 3, 4 or 5, or any other suitable short peptide linker as described herein or as known in the art.

[1472] 1m) DOM1h-549-GGGGSGGGGSGGGGS-SCDKTH-Trastuzumab Fc

[1473] Provided herein is a TNFR1 antagonist fusion protein, containing the human TNFR1 antagonist dAb DOM1h-549 (SEQ ID NO:58). The C-terminus of DOM1h-549 is fused to a GGGGSGGGGSGGGGS peptide linker, which is fused to a portion of the hinge sequence of trastuzumab, containing at least the sequence of residues SCDKTH (corresponding to residues 222-227 of SEQ ID NO:26), which is fused to the N-terminus of the trastuzumab Fc region (corresponding to residues 234-450 of SEQ ID NO:26; see, also, SEQ ID NO:27). The DOM1h-549-GGGGSGGGGSGGGGS-SCDKTH-Trastuzumab Fc fusion protein has the following sequence (SEQ ID NO:716):

EVQLLESGGGLVQPGGSLRLSCAASGFTFVDYEMH
WVRQAPGKGLEWVSSISESGTTTYYADSVKGRFTI
SRDNSKNTLYLQMNSLRAEDTAVYYCAKRRFSAST
FDYWGQGTLVTVSSGGGGSGGGGSGGGGSSCDKTH
APELLGGPSVFLFPPKPKDTLMISRTPEVTCVVVD
VSHEDPEVKFNWYVDGVEVHNAKTKPREEQYNSTY
RVVSVLTVLHQDWLNGKEYKCKVSNKALPAPIEKT
ISKAKGQPREPQVYTLPPSREEMTKNQVSLTCLVK
GFYPSDIAVEWESNGQPENNYKTTPPVLDSDGSFF
LYSKLTVDKSRWQQGNVFSCSVMHEALHNHYTQKS
LSLSPGK

[1474] Alternatively, the GGGGSGGGGSGGGGS linker is replaced by a Gly-Ser linker, such as a (GSGS)ₙ or a (GGGGS)ₙ linker, where n=1, 2, 3, 4 or 5, or any other suitable short peptide linker as described herein or as known in the art. Alternatively, or additionally, the SCDKTH hinge sequence is replaced by a portion containing at least 5, 6, 7, 8, 9, 10, or 11 contiguous residues, up to the full sequence of the hinge region of trastuzumab, containing the sequence EPKSCDKTHTCPPCP (corresponding to residues 219-233 of SEQ ID NO:26).

[1475] 1n) DOM1h-549-GGGGSGGGGSGGGGS-HSA

[1476] Provided herein is a TNFR1 antagonist fusion protein, containing the human TNFR1 antagonist dAb DOM1h-549 (SEQ ID NO:58). The C-terminus of DOM1h-549 is fused to a GGGGSGGGGSGGGGS peptide linker, which is fused to the N-terminus of human serum albumin (HSA) without the signal peptide (corresponding to residues 19-609 of SEQ ID NO:35). The DOM1h-549-GGGGSGGGGSGGGGS-HSA fusion protein has the following sequence (SEQ ID NO:717):

EVQLLESGGGLVQPGGSLRLSCAASGETFVDYEMH
WVRQAPGKGLEWVSSISESGTTTYYADSVKGRETI
SRDNSKNTLYLQMNSLRAEDTAVYYCAKRRESAST
FDYWGQGTLVTVSSGGGGSGGGGSGGGGSRGVFRR
DAHKSEVAHRFKDLGEENFKALVLIAFAQYLQQCP
FEDHVKLVNEVTEFAKTCVADESAENCDKSLHTLF
GDKLCTVATLRETYGEMADCCAKQEPERNECFLQH
KDDNPNLPRLVRPEVDVMCTAFHDNEETFLKKYLY
EIARRHPYFYAPELLFFAKRYKAAFTECCQAADKA
ACLLPKLDELRDEGKASSAKQRLKCASLQKFGERA
FKAWAVARLSQREPKAEFAEVSKLVTDLTKVHTEC
CHGDLLECADDRADLAKYICENQDSISSKLKECCE
KPLLEKSHCIAEVENDEMPADLPSLAADFVESKDV
CKNYAEAKDVFLGMFLYEYARRHPDYSVVLLLRLA
KTYETTLEKCCAAADPHECYAKVFDEFKPLVEEPQ
NLIKQNCELFEQLGEYKFQNALLVRYTKKVPQVST
PTLVEVSRNLGKVGSKCCKHPEAKRMPCAEDYLSV
VLNQLCVLHEKTPVSDRVTKCCTESLVNRRPCFSA
LEVDETYVPKEFNAETFTFHADICTLSEKERQIKK
QTALVELVKHKPKATKEQLKAVMDDFAAFVEKCCK
ADDKETCFAEEGKKLVAASQAALGL

[1477] Alternatively, the GGGGSGGGGSGGGGS linker is replaced by a Gly-Ser linker, such as a (GSGS)ₙ or a (GGGGS)ₙ linker, where n=1, 2, 3, 4 or 5, or any other suitable short peptide linker as described herein or as known in the art.

[1478] 1o) DOMIh-549-GGGGSGGGGSGGGGS-PEG_{30 kDa}

[1479] Provided herein is a TNFR1 antagonist fusion protein, containing the human TNFR1 antagonist dAb DOM1h-549 (SEQ ID NO:58). The C-terminus of DOM1h-549 is fused to a GGGGSGGGGSGGGGS peptide linker, which is covalently linked to a PEG molecule of 30 kDa in size.

[1480] Alternatively, the GGGGSGGGGSGGGGS linker is replaced by a Gly-Ser linker, such as a (GSGS)ₙ or a (GGGGS)ₙ linker, where n=1, 2, 3, 4 or 5, or any other suitable short peptide linker as described herein or as known in the art. Alternatively, or additionally, the PEG molecule can have a molecular weight of more than 30 kDa, such as, for example, 35 kDa, 40 kDa, 45 kDa, or 50 kDa.

[1481] 1p) DOM1h-574-208-SCDKTH-Trastuzumab Fc

[1482] Provided herein is a TNFR1 antagonist fusion protein, containing the human TNFR1 antagonist dAb DOM1h-574-208 (SEQ ID NO:54). The C-terminus of DOM1h-574-208 is fused to a portion of the hinge sequence of trastuzumab, containing at least the sequence of residues SCDKTH (corresponding to residues 222-227 of SEQ ID NO:26), which is fused to the N-terminus of the trastuzumab Fc region (corresponding to residues 234-450 of SEQ ID NO:26; see, also, SEQ ID NO:27). The DOM1h-574-208-SCDKTH-Trastuzumab Fc fusion protein has the following sequence SE ID NO:718):

EVQLLESGGGLVQPGGSLRLSCAASGFTEDKYSMG
WVRQAPGKGLEWVSQISDTADRTYYAHAVKGRETI
SRDNSKNTLYLQMNSLRAEDTAVYYCAIYTGRWVP
FEYWGQGTLVTVSSSCDKTHAPELLGGPSVFLEPP
KPKDTLMISRTPEVTCVVVDVSHEDPEVKFNWYVD
GVEVHNAKTKPREEQYNSTYRVVSVLTVLHQDWLN
GKEYKCKVSNKALPAPIEKTISKAKGQPREPQVYT
LPPSREEMTKNQVSLTCLVKGFYPSDIAVEWESNG
QPENNYKTTPPVLDSDGSFELYSKLTVDKSRWQQG
NVFSCSVMHEALHNHYTQKSLSLSPGK

[1483] Alternatively, the SCDKTH hinge sequence is replaced by at least a portion, containing at least 5, 6, 7, 8, 9, 10, or 11 contiguous residues, up to the full hinge region of trastuzumab, containing the sequence EPKSCDKTHTCPPCP (corresponding to residues 219-233 of SEQ ID NO:26).

[1484] 1q) DOM1h-574-208-GGGGSGGGGSGGGGS-Trastuzumab Fc

[1485] Provided herein is a TNFR1 antagonist fusion protein, containing the human TNFR1 antagonist dAb DOM1h-574-208 (SEQ ID NO:54). The C-terminus of DOM1h-574-208 is fused to a GGGGSGGGGSGGGGS peptide linker, which is fused to the N-terminus of the trastuzumab Fc region (corresponding to residues 234-450 of SEQ ID NO:26; see, also, SEQ ID NO:27). The DOM1h-574-208-GGGGSGGGGSGGGGS-Trastuzumab Fc fusion protein has the following sequence (SEQ ID NO:719):

EVQLLESGGGLVQPGGSLRLSCAASGETFDKYSMG
WVRQAPGKGLEWVSQISDTADRTYYAHAVKGRFTI
SRDNSKNTLYLQMNSLRAEDTAVYYCAIYTGRWVP
FEYWGQGTLVTVSSGGGGSGGGGSGGGGSAPELLG
GPSVFLFPPKPKDTLMISRTPEVTCVVVDVSHEDP
EVKFNWYVDGVEVHNAKTKPREEQYNSTYRVVSVL
TVLHQDWLNGKEYKCKVSNKALPAPIEKTISKAKG
QPREPQVYTLPPSREEMTKNQVSLTCLVKGFYPSD
IAVEWESNGQPENNYKTTPPVLDSDGSFFLYSKLT
VDKSRWQQGNVFSCSVMHEALHNHYTQKSLSLSPG
K

[1486] Alternatively, the GGGGSGGGGSGGGGS linker is replaced by a Gly-Ser linker, such as a (GSGS)ₙ or a (GGGGS)ₙ linker, where n=1, 2, 3, 4 or 5, or any other suitable short peptide linker as described herein or as known in the art.

[1487] 1r) DOM1h-574-208-GGGGSGGGGSGGGGS-SCDKTH-Trastuzumab Fc

[1488] Provided herein is a TNFR1 antagonist fusion protein, containing the human TNFR1 antagonist dAb DOM1h-574-208 (SEQ ID NO:54). The C-terminus of DOM1h-574-208 is fused to a GGGGSGGGGSGGGGS peptide linker, which is fused to a portion of the hinge sequence of trastuzumab, containing at least the sequence of residues SCDKTH (corresponding to residues 222-227 of SEQ ID NO:26), which is fused to the N-terminus of the trastuzumab Fc region (corresponding to residues 234-450 of SEQ ID NO:26; see, also, SEQ ID NO:27). The DOM1h-574-208-GGGGSGGGGSGGGGS-SCDKTH-Trastuzumab Fc fusion protein has the following sequence (SEQ ID NO:720):

EVQLLESGGGLVQPGGSLRLSCAASGETFDKYSMG
WVRQAPGKGLEWVSQISDTADRTYYAHAVKGRFTI
SRDNSKNTLYLQMNSLRAEDTAVYYCAIYTGRWVP
FEYWGQGTLVTVSSGGGGSGGGGSGGGGSSCDKTH
APELLGGPSVFLFPPKPKDTLMISRTPEVTCVVVD
VSHEDPEVKFNWYVDGVEVHNAKTKPREEQYNSTY
RVVSVLTVLHQDWLNGKEYKCKVSNKALPAPIEKT
ISKAKGQPREPQVYTLPPSREEMTKNQVSLTCLVK
GFYPSDIAVEWESNGQPENNYKTTPPVLDSDGSFF
LYSKLTVDKSRWQQGNVFSCSVMHEALHNHYTQKS
LSLSPGK

[1489] Alternatively, the GGGGSGGGGSGGGGS linker is replaced by a Gly-Ser linker, such as a (GSGS)ₙ or a (GGGGS)ₙ linker, where n=1, 2, 3, 4 or 5, or any other suitable short peptide linker as described herein or as known in the art. Alternatively, or additionally, the SCDKTH hinge sequence is replaced by at least a portion, containing at least 5, 6, 7, 8, 9, 10, or 11 contiguous residues, up to the full sequence, of the hinge region of trastuzumab, containing the sequence EPKSCDKTHTCPPCP (corresponding to residues 219-233 of SEQ ID NO:26).

[1490] 1s) DOM1h-574-208-GGGGSGGGGSGGGGS-HSA

[1491] Provided herein is a TNFR1 antagonist fusion protein, containing the human TNFR1 antagonist dAb DOM1h-574-208 (SEQ ID NO:54). The C-terminus of DOM1h-574-208 is fused to a GGGGSGGGGSGGGGS peptide linker, which is fused to the N-terminus of human serum albumin (HSA) without the signal peptide (corresponding to residues 19-609 of SEQ ID NO:35). The DOM1h-574-208-GGGGSGGGGSGGGGS-HSA fusion protein has the following sequence (SEQ ID NO:721):

EVQLLESGGGLVQPGGSLRLSCAASGETFDKYSMG
WVRQAPGKGLEWVSQISDTADRTYYAHAVKGRFTI
SRDNSKNTLYLQMNSLRAEDTAVYYCAIYTGRWVP
FEYWGQGTLVTVSSGGGGSGGGGSGGGGSRGVERR
DAHKSEVAHRFKDLGEENFKALVLIAFAQYLQQCP
FEDHVKLVNEVTEFAKTCVADESAENCDKSLHTLF
GDKLCTVATLRETYGEMADCCAKQEPERNECFLQH
KDDNPNLPRLVRPEVDVMCTAFHDNEETFLKKYLY
EIARRHPYFYAPELLFFAKRYKAAFTECCQAADKA
ACLLPKLDELRDEGKASSAKQRLKCASLQKFGERA
FKAWAVARLSQRFPKAEFAEVSKLVTDLTKVHTEC
CHGDLLECADDRADLAKYICENQDSISSKLKECCE
KPLLEKSHCIAEVENDEMPADLPSLAADFVESKDV
CKNYAEAKDVFLGMFLYEYARRHPDYSVVLLLRLA
KTYETTLEKCCAAADPHECYAKVFDEFKPLVEEPQ
NLIKQNCELFEQLGEYKFQNALLVRYTKKVPQVST
PTLVEVSRNLGKVGSKCCKHPEAKRMPCAEDYLSV
VLNQLCVLHEKTPVSDRVTKCCTESLVNRRPCFSA
LEVDETYVPKEFNAETFTFHADICTLSEKERQIKK
QTALVELVKHKPKATKEQLKAVMDDFAAFVEKCCK
ADDKETCFAEEGKKLVAASQAALGL

[1492] Alternatively, the GGGGSGGGGSGGGGS linker is replaced by a Gly-Ser linker, such as a (GSGS)ₙ or a (GGGGS)ₙ linker, where n=1, 2, 3, 4 or 5, or any other suitable short peptide linker as described herein or as known in the art.

[1493] 1t) DOM1h-574-208-GGGGSGGGGSGGGGS-PEG_{30 kDa}

[1494] Provided herein is a TNFR1 antagonist fusion protein, containing the human TNFR1 antagonist dAb DOM1h-574-208 (SEQ ID NO:54). The C-terminus of DOM1h-574-208 is fused to a GGGGSGGGGSGGGGS peptide linker, which is covalently linked to a PEG molecule of 30 kDa in size.

[1495] Alternatively, the GGGGSGGGGSGGGGS linker is replaced by a Gly-Ser linker, such as a (GSGS)ₙ or a (GGGGS)ₙ linker, where n=1, 2, 3, 4 or 5, or any other suitable short peptide linker as described herein or as known in the art. Alternatively or additionally, the PEG molecule can have a molecular weight of at least or more than 30 kDa, such as, for example, 35 kDa, 40 kDa, 45 kDa, or 50 kDa.

[1496] 1u) DOM1h-131-206-SCDKTH-Trastuzumab Fc

[1497] Provided herein is a TNFR1 antagonist fusion protein, containing the human TNFR1 antagonist dAb DOM1h-131-206 (SEQ ID NO:59). The C-terminus of DOM1h-131-206 is fused to a portion of the hinge sequence of trastuzumab, containing at least the sequence of residues SCDKTH (corresponding to residues 222-227 of SEQ ID NO:26), which is fused to the N-terminus of the trastuzumab Fc region (corresponding to residues 234-450 of SEQ ID NO:26; see, also, SEQ ID NO:27). The DOM1h-131-206-SCDKTH-Trastuzumab Fc fusion protein has the following sequence (SEQ ID NO:722):

EVQLLESGGGLVQPGGSLRLSCAASGFTFAHETMV
WVRQAPGKGLEWVSHIPPDGQDPFYADSVKGRFTI
SRDNSKNTLYLQMNSLRAEDTAVYHCALLPKRGPW
FDYWGQGTLVTVSSSCDKTHAPELLGGPSVFLEPP
KPKDTLMISRTPEVTCVVVDVSHEDPEVKFNWYVD
GVEVHNAKTKPREEQYNSTYRVVSVLTVLHQDWLN
GKEYKCKVSNKALPAPIEKTISKAKGQPREPQVYT
LPPSREEMTKNQVSLTCLVKGFYPSDIAVEWESNG
QPENNYKTTPPVLDSDGSFFLYSKLTVDKSRWQQG
NVFSCSVMHEALHNHYTQKSLSLSPGK

[1498] Alternatively, the SCDKTH hinge sequence is replaced by a portion containing at least 5, 6, 7, 8, 9, 10, or 11 contiguous residues, up to the full sequence of the hinge region of trastuzumab, containing the sequence EPKSCDKTHTCPPCP (corresponding to residues 219-233 of SEQ ID NO:26).

[1499] 1v) DOM1h-131-206-GGGGSGGGGSGGGGS-Trastuzumab Fc

[1500] Provided herein is a TNFR1 antagonist fusion protein, containing the human TNFR1 antagonist dAb DOM1h-131-206 (SEQ ID NO:59). The C-terminus of DOM1h-131-206 is fused to a GGGGSGGGGSGGGGS peptide linker, which is fused to the N-terminus of the trastuzumab Fc region (corresponding to residues 234-450 of SEQ ID NO:26; see, also, SEQ ID NO:27). The DOM1h-131-206-GGGGSGGGGSGGGGS-Trastuzumab Fc fusion protein has the following sequence (SEQ ID NO:723):

EVQLLESGGGLVQPGGSLRLSCAASGFTFAHETMV
WVRQAPGKGLEWVSHIPPDGQDPFYADSVKGRFTI
SRDNSKNTLYLQMNSLRAEDTAVYHCALLPKRGPW
FDYWGQGTLVTVSSGGGGSGGGGSGGGGSAPELLG
GPSVFLFPPKPKDTLMISRTPEVTCVVVDVSHEDP
EVKFNWYVDGVEVHNAKTKPREEQYNSTYRVVSVL
TVLHQDWLNGKEYKCKVSNKALPAPIEKTISKAKG
QPREPQVYTLPPSREEMTKNQVSLTCLVKGFYPSD
IAVEWESNGQPENNYKTTPPVLDSDGSFFLYSKLT
VDKSRWQQGNVFSCSVMHEALHNHYTQKSLSLSPG
K

[1501] Alternatively, the GGGGSGGGGSGGGGS linker is replaced by a Gly-Ser linker, such as a (GSGS)ₙ or a (GGGGS)ₙ linker, where n=1, 2, 3, 4 or 5, or any other suitable short peptide linker as described herein or as known in the art.

[1502] 1w) DOM1h-131-206-GGGGSGGGGSGGGGS-SCDKTH-Trastuzumab Fc

[1503] Provided herein is a TNFR1 antagonist fusion protein, containing the human TNFR1 antagonist dAb DOM1h-131-206 (SEQ ID NO:59). The C-terminus of DOM1h-131-206 is fused to a GGGGSGGGGSGGGGS peptide linker, which is fused to a portion of the hinge sequence of trastuzumab, containing at least the sequence of residues SCDKTH (corresponding to residues 222-227 of SEQ ID NO:26), which is fused to the N-terminus of the trastuzumab Fc region (corresponding to residues 234-450 of SEQ ID NO:26; see, also, SEQ ID NO:27). The DOM1h-131-206-GGGGSGGGGSGGGGS-SCDKTH-Trastuzumab Fc fusion protein has the following sequence (SEQ ID NO:724):

EVQLLESGGGLVQPGGSLRLSCAASGFTFAHETMV
WVRQAPGKGLEWVSHIPPDGQDPFYADSVKGRFTI
SRDNSKNTLYLQMNSLRAEDTAVYHCALLPKRGPW
FDYWGQGTLVTVSSGGGGSGGGGSGGGGSSCDKTH
APELLGGPSVFLFPPKPKDTLMISRTPEVTCVVVD
VSHEDPEVKFNWYVDGVEVHNAKTKPREEQYNSTY
RVVSVLTVLHQDWLNGKEYKCKVSNKALPAPIEKT
ISKAKGQPREPQVYTLPPSREEMTKNQVSLTCLVK
GFYPSDIAVEWESNGQPENNYKTTPPVLDSDGSFF
LYSKLTVDKSRWQQGNVFSCSVMHEALHNHYTQKS
LSLSPGK

[1504] Alternatively, the GGGGSGGGGSGGGGS linker is replaced by another Gly-Ser (GS) linker, such as a (GSGS)ₙ or a (GGGGS)ₙ linker, where n=1, 2, 3, 4 or 5, or any other suitable short peptide linker as described herein or as known in the art. Alternatively, or additionally, the SCDKTH hinge sequence is replaced by all or a portion containing at least 5, 6, 7, 8, 9, 10, or 11 contiguous residues, up to the full sequence of the hinge region of trastuzumab, containing the sequence EPKSCDKTHTCPPCP (corresponding to residues 219-233 of SEQ ID NO:26).

[1505] 1z) H398 scFv-ESKYGPPCPPCP-Nivolumab Fc

[1506] Provided herein is a human TNFR1 antagonist fusion protein, containing an scFv derived from the human TNFR1 antagonist antibody H398. The scFv contains the V_{L} and V_{H} domains of H398, linked together by a (GGGGS)₃ peptide linker. The C-terminus of the H398 scFv (SEQ ID NO:678) is fused to the hinge sequence of nivolumab, containing the sequence ESKYGPPCPPCP (corresponding to residues 212-223 of SEQ ID NO:29), which is fused to the N-terminus of the nivolumab Fc region (corresponding to residues 224-440 of SEQ ID NO:29; see, also, SEQ ID NO:30). The H398 scFv-ESKYGPPCPPCP-Nivolumab Fc fusion protein has the following sequence (SEQ ID NO:726):

QVQLQESGAELARPGASVKLSCKASGYTFTDFYIN
WVKQRTGQGLEWIGEIYPYSGHAYYNEKFKAKATL
TADKSSSTAFMQLNSLTSEDSAVYFCVRWDFLDYW
GQGTTLTVSSGGGGSGGGGSGGGGSDIVMTQSPLS
LPVSLGDQASISCRSSQSLLHSNGNTYLHWYVQKP
GQSPKLLIYTVSNRFSGVPDRFSGSGSGTDFTLKI
SRVEAEDLGVYFCSQSTHVPYTEGGGTKLEIKRES
KYGPPCPPCPAPEFLGGPSVFLEPPKPKDTLMISR
TPEVTCVVVDVSQEDPEVQFNWYVDGVEVHNAKTK
PREEQFNSTYRVVSVLTVLHQDWLNGKEYKCKVSN
KGLPSSIEKTISKAKGQPREPQVYTLPPSQEEMTK
NQVSLTCLVKGFYPSDIAVEWESNGQPENNYKTTP
PVLDSDGSFFLYSRLTVDKSRWQEGNVFSCSVMHE
ALHNHYTQKSLSLSLGK

[1507] Alternatively, all or a portion of the nivolumab hinge sequence, containing at least 5, 6, 7, 8, 9, 10, or 11 contiguous residues of the ESKYGPPCPPCP hinge sequence (corresponding to residues 212-223 of SEQ ID NO:29), is used.

[1508] 1aa) H398 scFv-GGGGSGGGGSGGGGS-Nivolumab Fc

[1509] Provided herein is a TNFR1 antagonist fusion protein, containing an scFv derived from the human TNFR1 antagonist antibody H398. The scFv contains the V_{L} and V_{H} domains of H398, linked together by a (GGGGS)₃ peptide linker. The C-terminus of the H398 scFv (SEQ ID NO:678) is fused to a GGGGSGGGGSGGGGS peptide linker, which is fused to the N-terminus of the nivolumab Fc region (corresponding to residues 224-440 of SEQ ID NO:29; see, also, SEQ ID NO:30). The H398 scFv-GGGGSGGGGSGGGGS-Nivolumab Fc fusion protein has the following sequence (SEQ ID NO:727):

QVQLQESGAELARPGASVKLSCKASGYTFTDFYIN
WVKQRTGQGLEWIGEIYPYSGHAYYNEKFKAKATL
TADKSSSTAFMQLNSLTSEDSAVYFCVRWDFLDYW
GQGTTLTVSSGGGGSGGGGSGGGGSDIVMTQSPLS
LPVSLGDQASISCRSSQSLLHSNGNTYLHWYVQKP
GQSPKLLIYTVSNRFSGVPDRFSGSGSGTDFTLKI
SRVEAEDLGVYFCSQSTHVPYTEGGGTKLEIKRGG
GGSGGGGSGGGGSAPEFLGGPSVFLEPPKPKDTLM
ISRTPEVTCVVVDVSQEDPEVQFNWYVDGVEVHNA
KTKPREEQFNSTYRVVSVLTVLHQDWLNGKEYKCK
VSNKGLPSSIEKTISKAKGQPREPQVYTLPPSQEE
MTKNQVSLTCLVKGFYPSDIAVEWESNGQPENNYK
TTPPVLDSDGSFFLYSRLTVDKSRWQEGNVFSCSV
MHEALHNHYTQKSLSLSLGK

[1510] Alternatively, the GGGGSGGGGSGGGGS linker is replaced by a Gly-Ser linker, such as a (GSGS)ₙ or a (GGGGS)ₙ linker, where n=1, 2, 3, 4 or 5, or any other suitable short peptide linker as described herein or as known in the art.

[1511] 1ab) H398 scFv-GGGGSGGGGSGGGGS-ESKYGPPCPPCP-Nivolumab Fc

[1512] Provided herein is a TNFR1 antagonist fusion protein, containing an scFv derived from the human TNFR1 antagonist antibody H398. The scFv contains the V_{L} and V_{H} domains of H398, linked together by a (GGGGS)₃ peptide linker. The C-terminus of the H398 scFv (SEQ ID NO:678) is fused to a GGGGSGGGGSGGGGS peptide linker, which is fused to the hinge sequence of nivolumab, containing the sequence ESKYGPPCPPCP (corresponding to residues 212-223 of SEQ ID NO:29), which is fused to the N-terminus of the nivolumab Fc region (corresponding to residues 224-440 of SEQ ID NO:29; see, also, SEQ ID NO:30). The H398 scFv-GGGGSGGGGSGGGGS-ESKYGPPCPPCP-Nivolumab Fc fusion protein has the following sequence (SEQ ID NO:728):

QVQLQESGAELARPGASVKLSCKASGYTFTDFYIN
WVKQRTGQGLEWIGEIYPYSGHAYYNEKFKAKATL
TADKSSSTAFMQLNSLTSEDSAVYFCVRWDFLDYW
GQGTTLTVSSGGGGSGGGGSGGGGSDIVMTQSPLS
LPVSLGDQASISCRSSQSLLHSNGNTYLHWYVQKP
GQSPKLLIYTVSNRFSGVPDRFSGSGSGTDFTLKI
SRVEAEDLGVYFCSQSTHVPYTFGGGTKLEIKRGG
GGSGGGGSGGGGSESKYGPPCPPCPAPEFLGGPSV
FLFPPKPKDTLMISRTPEVTCVVVDVSQEDPEVQF
NWYVDGVEVHNAKTKPREEQFNSTYRVVSVLTVLH
QDWLNGKEYKCKVSNKGLPSSIEKTISKAKGQPRE
PQVYTLPPSQEEMTKNQVSLTCLVKGFYPSDIAVE
WESNGQPENNYKTTPPVLDSDGSFFLYSRLTVDKS
RWQEGNVFSCSVMHEALHNHYTQKSLSLSLGK

[1513] Alternatively, the GGGGSGGGGSGGGGS linker is replaced by a Gly-Ser linker, such as a (GSGS)ₙ or a (GGGGS)ₙ linker, where n=1, 2, 3, 4 or 5, or any other suitable short peptide linker as described herein or as known in the art. Alternatively, or additionally, all or a portion of the nivolumab hinge sequence, containing at least 5, 6, 7, 8, 9, 10, or 11 contiguous residues of the ESKYGPPCPPCP hinge sequence (corresponding to residues 212-223 of SEQ ID NO:29), is used.

[1514] 1ac) DOM1h-574-16-ESKYGPPCPPCP-Nivolumab Fc

[1515] Provided herein is a TNFR1 antagonist fusion protein, containing the human TNFR1 antagonist dAb DOM1h-574-16 (SEQ ID NO:57). The C-terminus of DOM1h-574-16 is fused to the hinge sequence of nivolumab, containing the sequence ESKYGPPCPPCP (corresponding to residues 212-223 of SEQ ID NO:29), which is fused to the N-terminus of the nivolumab Fc region (corresponding to residues 224-440 of SEQ ID NO:29; see, also, SEQ ID NO:30). The DOM1h-574-16-ESKYGPPCPPCP-Nivolumab Fc fusion protein has the following sequence (SEQ ID NO:729):

EVQLLESGGGLVQPGGSLRLSCAASGETFVKYSMG
WVRQAPGKGPEWVSQISNTGDRTYYADSVKGRFTI
SRDNSKNTLYLQMNSLRAEDTAVYYCAIYTGRWEP
FDYWGQGTLVTVSSESKYGPPCPPCPAPEFLGGPS
VFLEPPKPKDTLMISRTPEVTCVVVDVSQEDPEVQ
FNWYVDGVEVHNAKTKPREEQFNSTYRVVSVLTVL
HQDWLNGKEYKCKVSNKGLPSSIEKTISKAKGQPR
EPQVYTLPPSQEEMTKNQVSLTCLVKGFYPSDIAV
EWESNGQPENNYKTTPPVLDSDGSFFLYSRLTVDK
SRWQEGNVFSCSVMHEALHNHYTQKSLSLSLGK

[1516] Alternatively, all or a portion of the nivolumab hinge sequence, containing at least 5, 6, 7, 8, 9, 10, or 11 contiguous residues of the ESKYGPPCPPCP hinge sequence (corresponding to residues 212-223 of SEQ ID NO:29), is used.

[1517] 1ad) DOM1h-574-16-GGGGSGGGGSGGGGS-Nivolumab Fc

[1518] Provided herein is a TNFR1 antagonist fusion protein, containing the human TNFR1 antagonist dAb DOM1h-574-16 (SEQ ID NO:57). The C-terminus of DOM1h-574-16 is fused to a GGGGSGGGGSGGGGS peptide linker, which is fused to the N-terminus of the nivolumab Fc region (corresponding to residues 224-440 of SEQ ID NO:29; see, also, SEQ ID NO:30). The DOM1h-574-16-GGGGSGGGGSGGGGS-Nivolumab Fc fusion protein has the following sequence (SEQ ID NO:730):

EVQLLESGGGLVQPGGSLRLSCAASGETFVKYSMG
WVRQAPGKGPEWVSQISNTGDRTYYADSVKGRETI
SRDNSKNTLYLQMNSLRAEDTAVYYCAIYTGRWEP
FDYWGQGTLVTVSSGGGGSGGGGSGGGGSAPEFLG
GPSVFLFPPKPKDTLMISRTPEVTCVVVDVSQEDP
EVQFNWYVDGVEVHNAKTKPREEQFNSTYRVVSVL
TVLHQDWLNGKEYKCKVSNKGLPSSIEKTISKAKG
QPREPQVYTLPPSQEEMTKNQVSLTCLVKGFYPSD
IAVEWESNGQPENNYKTTPPVLDSDGSFFLYSRLT
VDKSRWQEGNVFSCSVMHEALHNHYTQKSLSLSLG
K

[1519] Alternatively, the GGGGSGGGGSGGGGS linker is replaced by a Gly-Ser linker, such as a (GSGS)ₙ or a (GGGGS)ₙ linker, where n=1, 2, 3, 4 or 5, or any other suitable short peptide linker as described herein or as known in the art.

[1520] 1ae) DOM1h-574-16-GGGGSGGGGSGGGGS-ESKYGPPCPPCP-Nivolumab Fc

[1521] Provided herein is a TNFR1 antagonist fusion protein, containing the human TNFR1 antagonist dAb DOM1h-574-16 (SEQ ID NO:57). The C-terminus of DOM1h-574-16 is fused to a GGGGSGGGGSGGGGS peptide linker, which is fused to the hinge sequence of nivolumab, containing the sequence ESKYGPPCPPCP (corresponding to residues 212-223 of SEQ ID NO:29), which is fused to the N-terminus of the nivolumab Fc region (corresponding to residues 224-440 of SEQ ID NO:29; see, also, SEQ ID NO:30). The DOM1h-574-16-GGGGSGGGGSGGGGS-ESKYGPPCPPCP-Nivolumab Fc fusion protein has the following sequence (SEQ ID NO:731):

EVQLLESGGGLVQPGGSLRLSCAASGETFVKYSMG
WVRQAPGKGPEWVSQISNTGDRTYYADSVKGRFTI
SRDNSKNTLYLQMNSLRAEDTAVYYCAIYTGRWEP
FDYWGQGTLVTVSSGGGGSGGGGSGGGGSESKYGP
PCPPCPAPEFLGGPSVFLEPPKPKDTLMISRTPEV
TCVVVDVSQEDPEVQFNWYVDGVEVHNAKTKPREE
QFNSTYRVVSVLTVLHQDWLNGKEYKCKVSNKGLP
SSIEKTISKAKGQPREPQVYTLPPSQEEMTKNQVS
LTCLVKGFYPSDIAVEWESNGQPENNYKTTPPVLD
SDGSFFLYSRLTVDKSRWQEGNVFSCSVMHEALHN
HYTQKSLSLSLGK

[1522] Alternatively, the GGGGSGGGGSGGGGS linker is replaced by a Gly-Ser linker, such as a (GSGS)ₙ or a (GGGGS)ₙ linker, where n=1, 2, 3, 4 or 5, or any other suitable short peptide linker as described herein or as known in the art. Alternatively, or additionally, at least a portion of the nivolumab hinge sequence, containing at least 5, 6, 7, 8, 9, 10, or 11 contiguous residues, up to the full sequence, of the ESKYGPPCPPCP hinge sequence (corresponding to residues 212-223 of SEQ ID NO:29), is included.

[1523] 1af) DOM1h-549-ESKYGPPCPPCP-Nivolumab Fc

[1524] Provided herein is a TNFR1 antagonist fusion protein, containing the human TNFR1 antagonist dAb DOM1h-549 (SEQ ID NO:58). The C-terminus of DOM1h-549 is fused to the hinge sequence of nivolumab, containing the sequence ESKYGPPCPPCP (corresponding to residues 212-223 of SEQ ID NO:29), which is fused to the N-terminus of the nivolumab Fc region (corresponding to residues 224-440 of SEQ ID NO:29; see, also, SEQ ID NO:30). The DOM1h-549-ESKYGPPCPPCP-Nivolumab Fc fusion protein has the following sequence (SEQ ID NO:732):

EVQLLESGGGLVQPGGSLRLSCAASGETFVDYEMH
WVRQAPGKGLEWVSSISESGTTTYYADSVKGRETI
SRDNSKNTLYLQMNSLRAEDTAVYYCAKRRESAST
EDYWGQGTLVTVSSESKYGPPCPPCPAPEFLGGPS
VFLEPPKPKDTLMISRTPEVTCVVVDVSQEDPEVQ
FNWYVDGVEVHNAKTKPREEQFNSTYRVVSVLTVL
HQDWLNGKEYKCKVSNKGLPSSIEKTISKAKGQPR
EPQVYTLPPSQEEMTKNQVSLTCLVKGFYPSDIAV
EWESNGQPENNYKTTPPVLDSDGSFFLYSRLTVDK
SRWQEGNVFSCSVMHEALHNHYTQKSLSLSLGK

[1525] Alternatively, all or a portion of the nivolumab hinge sequence, containing at least 5, 6, 7, 8, 9, 10, or 11 contiguous residues of the ESKYGPPCPPCP hinge sequence (corresponding to residues 212-223 of SEQ ID NO:29), is included.

[1526] 1ag) DOM1h-549-GGGGSGGGGSGGGGS-Nivolumab Fc

[1527] Provided herein is a TNFR1 antagonist fusion protein, containing the human TNFR1 antagonist dAb DOM1h-549 (SEQ ID NO:58). The C-terminus of DOM1h-549 is fused to a GGGGSGGGGSGGGGS peptide linker, which is fused to the N-terminus of the nivolumab Fc region (corresponding to residues 224-440 of SEQ ID NO:29; see, also, SEQ ID NO:30). The DOM1h-549-GGGGSGGGGSGGGGS-Nivolumab Fc fusion protein has the following sequence (SEQ ID NO:733):

EVQLLESGGGLVQPGGSLRLSCAASGFTFVDYEMH
WVRQAPGKGLEWVSSISESGTTTYYADSVKGRETI
SRDNSKNTLYLQMNSLRAEDTAVYYCAKRRESAST
EDYWGQGTLVTVSSGGGGSGGGGSGGGGSAPEFLG
GPSVFLFPPKPKDTLMISRTPEVTCVVVDVSQEDP
EVQFNWYVDGVEVHNAKTKPREEQFNSTYRVVSVL
TVLHQDWLNGKEYKCKVSNKGLPSSIEKTISKAKG
QPREPQVYTLPPSQEEMTKNQVSLTCLVKGFYPSD
IAVEWESNGQPENNYKTTPPVLDSDGSFFLYSRLT
VDKSRWQEGNVFSCSVMHEALHNHYTQKSLSLSLG
K

[1528] Alternatively, the GGGGSGGGGSGGGGS linker is replaced by a Gly-Ser linker, such as a (GSGS)ₙ or a (GGGGS)ₙ linker, where n=1, 2, 3, 4 or 5, or any other suitable short peptide linker as described herein or as known in the art.

[1529] 1ah) DOM1h-549-GGGGSGGGGSGGGGS-ESKYGPPCPPCP-Nivolumab Fc

[1530] Provided herein is a TNFR1 antagonist fusion protein, containing the human TNFR1 antagonist dAb DOM1h-549 (SEQ ID NO:58). The C-terminus of DOM1h-549 is fused to a GGGGSGGGGSGGGGS peptide linker, which is fused to the hinge sequence of nivolumab, containing the sequence ESKYGPPCPPCP (corresponding to residues 212-223 of SEQ ID NO:29), which is fused to the N-terminus of the nivolumab Fc region (corresponding to residues 224-440 of SEQ ID NO:29; see, also, SEQ ID NO:30). The DOM1h-549-GGGGSGGGGSGGGGS-ESKYGPPCPPCP-Nivolumab Fc fusion protein has the following sequence (SEQ ID NO:734):

EVQLLESGGGLVQPGGSLRLSCAASGETFVDYEMH
WVRQAPGKGLEWVSSISESGTTTYYADSVKGRFTI
SRDNSKNTLYLQMNSLRAEDTAVYYCAKRRFSAST
FDYWGQGTLVTVSSGGGGSGGGGSGGGGSESKYGP
PCPPCPAPEFLGGPSVFLFPPKPKDTLMISRTPEV
TCVVVDVSQEDPEVQFNWYVDGVEVHNAKTKPREE
QFNSTYRVVSVLTVLHQDWLNGKEYKCKVSNKGLP
SSIEKTISKAKGQPREPQVYTLPPSQEEMTKNQVS
LTCLVKGFYPSDIAVEWESNGQPENNYKTTPPVLD
SDGSFFLYSRLTVDKSRWQEGNVFSCSVMHEALHN
HYTQKSLSLSLGK

[1531] The GGGGSGGGGSGGGGS linker, in some embodiments, is replaced with a GS linker, such as a (GSGS)ₙ or a (GGGGS)ₙ linker, where n=1, 2, 3, 4 or 5, or any other suitable short peptide linker as described herein or as known in the art. Alternatively, or additionally, all or a portion of the nivolumab hinge sequence, containing at least 5, 6, 7, 8, 9, 10, or 11 contiguous residues of the ESKYGPPCPPCP hinge sequence (corresponding to residues 212-223 of SEQ ID NO:29), is included.

[1532] 1ai) DOM1h-574-208-ESKYGPPCPPCP-Nivolumab Fc

[1533] Provided herein is a TNFR1 antagonist fusion protein, containing the human TNFR1 antagonist dAb DOM1h-574-208 (SEQ ID NO:54). The C-terminus of DOM1h-574-208 is fused to the hinge sequence of nivolumab, containing the sequence ESKYGPPCPPCP (corresponding to residues 212-223 of SEQ ID NO:29), which is fused to the N-terminus of the nivolumab Fc region (corresponding to residues 224-440 of SEQ ID NO:29; see, also, SEQ ID NO:30). The DOM1h-574-208-ESKYGPPCPPCP-Nivolumab Fc fusion protein has the following sequence (SEQ ID NO:735):

EVQLLESGGGLVQPGGSLRLSCAASGETFDKYSMG
WVRQAPGKGLEWVSQISDTADRTYYAHAVKGRFTI
SRDNSKNTLYLQMNSLRAEDTAVYYCAIYTGRWVP
FEYWGQGTLVTVSSESKYGPPCPPCPAPEFLGGPS
VFLEPPKPKDTLMISRTPEVTCVVVDVSQEDPEVQ
FNWYVDGVEVHNAKTKPREEQFNSTYRVVSVLTVL
HQDWLNGKEYKCKVSNKGLPSSIEKTISKAKGQPR
EPQVYTLPPSQEEMTKNQVSLTCLVKGFYPSDIAV
EWESNGQPENNYKTTPPVLDSDGSFFLYSRLTVDK
SRWQEGNVFSCSVMHEALHNHYTQKSLSLSLGK

[1534] Alternatively, all or a portion of the nivolumab hinge sequence, containing at least at least 5, 6, 7, 8, 9, 10, or 11 contiguous residues of the ESKYGPPCPPCP hinge sequence (corresponding to residues 212-223 of SEQ ID NO:29), can be included.

[1535] 1aj) DOM1h-574-208-GGGGSGGGGSGGGGS-Nivolumab Fc

[1536] Provided herein is a TNFR1 antagonist fusion protein, containing the human TNFR1 antagonist dAb DOM1h-574-208 (SEQ ID NO:54). The C-terminus of DOM1h-574-208 is fused to a GGGGSGGGGSGGGGS peptide linker, which is fused to the N-terminus of the nivolumab Fc region (corresponding to residues 224-440 of SEQ ID NO:29; see, also, SEQ ID NO:30). The DOM1h-574-208-GGGGSGGGGSGGGGS-Nivolumab Fc fusion protein has the following sequence (SEQ ID NO:736):

EVQLLESGGGLVQPGGSLRLSCAASGETFDKYSMG
WVRQAPGKGLEWVSQISDTADRTYYAHAVKGRFTI
SRDNSKNTLYLQMNSLRAEDTAVYYCAIYTGRWVP
FEYWGQGTLVTVSSGGGGSGGGGSGGGGSAPEFLG
GPSVFLFPPKPKDTLMISRTPEVTCVVVDVSQEDP
EVQFNWYVDGVEVHNAKTKPREEQFNSTYRVVSVL
TVLHQDWLNGKEYKCKVSNKGLPSSIEKTISKAKG
QPREPQVYTLPPSQEEMTKNQVSLTCLVKGFYPSD
IAVEWESNGQPENNYKTTPPVLDSDGSFFLYSRLT
VDKSRWQEGNVFSCSVMHEALHNHYTQKSLSLSLG
K

[1537] Alternatively, the GGGGSGGGGSGGGGS linker is replaced by a Gly-Ser linker, such as a (GSGS)ₙ or a (GGGGS)ₙ linker, where n=1, 2, 3, 4, or 5, or any other suitable short peptide linker as described herein or as known in the art.

[1538] 1ak) DOM1h-574-208-GGGGSGGGGSGGGGS-ESKYGPPCPPCP-Nivolumab Fc

[1539] Provided herein is a TNFR1 antagonist fusion protein, containing the human TNFR1 antagonist dAb DOM1h-574-208 (SEQ ID NO:54). The C-terminus of DOM1h-574-208 is fused to a GGGGSGGGGSGGGGS peptide linker, which is fused to the hinge sequence of nivolumab, containing the sequence ESKYGPPCPPCP (corresponding to residues 212-223 of SEQ ID NO:29), which is fused to the N-terminus of the nivolumab Fc region (corresponding to residues 224-440 of SEQ ID NO:29; see, also, SEQ ID NO:30). The DOM1h-574-208-GGGGSGGGGSGGGGS-ESKYGPPCPPCP-Nivolumab Fc fusion protein has the following sequence (SEQ ID NO:737):

EVQLLESGGGLVQPGGSLRLSCAASGETFDKYSMG
WVRQAPGKGLEWVSQISDTADRTYYAHAVKGRFTI
SRDNSKNTLYLQMNSLRAEDTAVYYCAIYTGRWVP
FEYWGQGTLVTVSSGGGGSGGGGSGGGGSESKYGP
PCPPCPAPEFLGGPSVFLEPPKPKDTLMISRTPEV
TCVVVDVSQEDPEVQFNWYVDGVEVHNAKTKPREE
QFNSTYRVVSVLTVLHQDWLNGKEYKCKVSNKGLP
SSIEKTISKAKGQPREPQVYTLPPSQEEMTKNQVS
LTCLVKGFYPSDIAVEWESNGQPENNYKTTPPVLD
SDGSFFLYSRLTVDKSRWQEGNVFSCSVMHEALHN
HYTQKSLSLSLGK

[1540] Alternatively, the GGGGSGGGGSGGGGS linker is replaced by a (GSGS)ₙ or a (GGGGS)ₙ linker, where n=1, 2, 3, 4, or 5, or any other suitable short peptide linker as described herein or as known in the art. Alternatively, or additionally, all or a portion of the nivolumab hinge sequence, containing at least 5, 6, 7, 8, 9, 10, or 11 contiguous residues of the ESKYGPPCPPCP hinge sequence (corresponding to residues 212-223 of SEQ ID NO:29), is included.

[1541] 1al) DOM1h-131-206-ESKYGPPCPPCP-Nivolumab Fc

[1542] Provided herein is a TNFR1 antagonist fusion protein, containing the human TNFR1 antagonist dAb DOM1h-131-206 (SEQ ID NO:59). The C-terminus of DOM1h-131-206 is fused to the hinge sequence of nivolumab, containing the sequence ESKYGPPCPPCP (corresponding to residues 212-223 of SEQ ID NO:29), which is fused to the N-terminus of the nivolumab Fc region (corresponding to residues 224-440 of SEQ ID NO:29; see, also, SEQ ID NO:30). The DOM1h-131-206-ESKYGPPCPPCP-Nivolumab Fc fusion protein has the following sequence (SEQ ID NO:738):

EVQLLESGGGLVQPGGSLRLSCAASGFTFAHETMV
WVRQAPGKGLEWVSHIPPDGQDPFYADSVKGRFTI
SRDNSKNTLYLQMNSLRAEDTAVYHCALLPKRGPW
FDYWGQGTLVTVSSESKYGPPCPPCPAPEFLGGPS
VFLFPPKPKDTLMISRTPEVTCVVVDVSQEDPEVQ
FNWYVDGVEVHNAKTKPREEQFNSTYRVVSVLTVL
HQDWLNGKEYKCKVSNKGLPSSIEKTISKAKGQPR
EPQVYTLPPSQEEMTKNQVSLTCLVKGFYPSDIAV
EWESNGQPENNYKTTPPVLDSDGSFFLYSRLTVDK
SRWQEGNVFSCSVMHEALHNHYTQKSLSLSLGK

[1543] Alternatively, all or a portion of the nivolumab hinge sequence, containing at least 5, 6, 7, 8, 9, 10, or 11 contiguous residues of the ESKYGPPCPPCP hinge sequence (corresponding to residues 212-223 of SEQ ID NO:29), is included.

[1544] 1am) DOM1h-131-206-GGGGSGGGGSGGGGS-Nivolumab Fc

[1545] Provided herein is a TNFR1 antagonist fusion protein, containing the human TNFR1 antagonist dAb DOM1h-131-206 (SEQ ID NO:59). The C-terminus of DOM1h-131-206 is fused to a GGGGSGGGGSGGGGS peptide linker, which is fused to the N-terminus of the nivolumab Fc region (corresponding to residues 224-440 of SEQ ID NO:29; see, also, SEQ ID NO:30). The DOM1h-131-206-GGGGSGGGGSGGGGS-Nivolumab Fc fusion protein has the following sequence (SEQ ID NO:739):

EVQLLESGGGLVQPGGSLRLSCAASGETFAHETMV
WVRQAPGKGLEWVSHIPPDGQDPFYADSVKGRETI
SRDNSKNTLYLQMNSLRAEDTAVYHCALLPKRGPW
FDYWGQGTLVTVSSGGGGSGGGGSGGGGSAPEFLG
GPSVFLFPPKPKDTLMISRTPEVTCVVVDVSQEDP
EVQFNWYVDGVEVHNAKTKPREEQFNSTYRVVSVL
TVLHQDWLNGKEYKCKVSNKGLPSSIEKTISKAKG
QPREPQVYTLPPSQEEMTKNQVSLTCLVKGFYPSD
IAVEWESNGQPENNYKTTPPVLDSDGSFFLYSRLT
VDKSRWQEGNVFSCSVMHEALHNHYTQKSLSLSLG
K

[1546] Alternatively, the GGGGSGGGGSGGGGS linker is replaced by a (GSGS)ₙ or a (GGGGS)ₙ linker, where n=1, 2, 3, 4, or 5, or any other suitable short peptide linker as described herein or as known in the art.

[1547] 1an) DOM1h-131-206-GGGGSGGGGSGGGGS-ESKYGPPCPPCP-Nivolumab Fc

[1548] Provided herein is a TNFR1 antagonist fusion protein, containing the human TNFR1 antagonist dAb DOM1h-131-206 (SEQ ID NO:59). The C-terminus of DOM1h-131-206 is fused to a GGGGSGGGGSGGGGS peptide linker, which is fused to the hinge sequence of nivolumab, containing the sequence ESKYGPPCPPCP (corresponding to residues 212-223 of SEQ ID NO:29), which is fused to the N-terminus of the nivolumab Fc region (corresponding to residues 224-440 of SEQ ID NO:29; see, also, SEQ ID NO:30). The DOM1h-131-206-GGGGSGGGGSGGGGS-ESKYGPPCPPCP-Nivolumab Fc fusion protein has the following sequence (SEQ ID NO:740):

EVQLLESGGGLVQPGGSLRLSCAASGFTFAHETMV
WVRQAPGKGLEWVSHIPPDGQDPFYADSVKGRFTI
SRDNSKNTLYLQMNSLRAEDTAVYHCALLPKRGPW
FDYWGQGTLVTVSSSGGGGSGGGGSGGGGSESKYG
PPCPPCPAPEFLGGPSVFLFPPKPKDTLMISRTPE
VTCVVVDVSQEDPEVQFNWYVDGVEVHNAKTKPRE
EQFNSTYRVVSVLTVLHQDWLNGKEYKCKVSNKGL
PSSIEKTISKAKGQPREPQVYTLPPSQEEMTKNQV
SLTCLVKGFYPSDIAVEWESNGQPENNYKTTPPVL
DSDGSFFLYSRLTVDKSRWQEGNVFSCSVMHEALH
NHYTQKSLSLSLGK

[1549] Alternatively, the GGGGSGGGGSGGGGS linker is replaced by a (GSGS)ₙ or a (GGGGS)ₙ linker, where n=1, 2, 3, 4, or 5, or any other suitable short peptide linker as described herein or as known in the art. Alternatively, or additionally, all or a portion of the nivolumab hinge sequence, containing at least 5, 6, 7, 8, 9, 10, or 11 contiguous residues of the ESKYGPPCPPCP hinge sequence (corresponding to residues 212-223 of SEQ ID NO:29), is included.

[1550] Also synthesized were Vhh (nanobodies), particularly single chain forms thereof, linked to HSA, that comprises the dAbs, such as DOM1h-131-206. Exemplary Vhh constructs were assessed for binding and inhibition of TNFR1. These are described in an Example below.

### Example 5

### Exemplary TNFR1 Antagonist Constructs Containing Human TNFR1 Antagonist TNF Muteins

[1551] Provided herein is a TNFR1 antagonist that selectively inhibits TNFR1, without inhibiting TNFR2. To avoid TNFR1 receptor clustering, which agonizes TNFR1, the TNFR1 antagonist is monovalent. The TNFR1 antagonist can contain a signaling-incompetent dominant-negative inhibitor of TNF (DN-TNF), also known as a TNF mutein, which is an engineered variant of TNF with one or more mutations that abrogate signaling through TNFR1. For example, the TNF mutein can contain one or more mutations that impart selectivity for TNFR1, but not for TNFR2. TNFR1-selective TNF mutations include any one or more of L29S, L29G, L29Y, R31E, R31N, R32Y, R32W, S86T, L29S/R32W, L29S/S86T, R32W/S86T, L29S/R32W/S86T, R31N/R32T, R31E/S86T, R31N/R32T/S86T, E146R, V1M, R31C, C69V, Y87H, C101A, A145R, V1M/R31C/C69V/Y87H/C101A/A145R, I97T, I97T/A145R, A84S, V85T, Q88N, T89Q, and A84S/V85T/S86T/Y87H/Q88N/T89Q, and combinations thereof, with reference to the sequence of soluble TNF (solTNF), set forth in SEQ ID NO:2.

[1552] For example, the TNFR1 antagonist can contain a TNF mutein with the mutations R32W/S86T (SEQ ID NO:685), V1M/R31C/C69V/Y87H/C101A/A145R (SEQ ID NO:701; as in XPro1595), A84S/V85T/S86T/Y87H/Q88N/T89Q (SEQ ID NO:703; as in R1antTNF), or I97T/A145R (SEQ ID NO:702; as in XENP345).

[1553] The TNFR1 antagonist is fused to a serum half-life extender, such as an IgG Fc. For example, the C-terminus of the human TNFR1 antagonistic TNF mutein, is fused with the N-terminus of the Fc region of a human IgG1 or IgG4 antibody via a linker. An IgG1 Fc region, such as the IgG1 Fc derived from trastuzumab (see, SEQ ID NO:27), or an IgG4 Fc region, such as the IgG4 derived from nivolumab (see, SEQ ID NO:30), is used. The linker can contain all or a portion of the hinge sequence of trastuzumab, containing at least residues SCDKTH (corresponding to residues 222-227 of SEQ ID NO:26), when the Fc is derived from trastuzumab, or can contain the hinge sequence of nivolumab, ESKYGPPCPPCP (corresponding to residues 212-223 of SEQ ID NO:29), or a portion thereof, when the Fc is derived from nivolumab. To confer protease resistance, and to increase the flexibility of the fusion protein, the SCDKTH or ESKYGPPCPPCP hinge sequences, or the portions thereof, are replaced with a short glycine-serine (GS) peptide linker, such as, for example, (GSGS)ₙ or (GGGGS)ₙ, where n=1-5, such as, for example, GGGGSGGGGSGGGGS. In an alternative embodiment, the C-terminus of the human anti-TNFR1 TNF mutein, is linked to the GS linker, and the GS linker is connected to all or a portion, sufficient to provide flexibility, of the trastuzumab or nivolumab hinge sequence, which is connected to the N-terminus of the corresponding Fc region. In some embodiments, a second Fc subunit is linked to the first Fc region, which can increase the serum half-life and stability of the molecule. The resulting construct is not a fusion protein.

[1554] The following are exemplary constructs of the TNFR1 antagonist fusion proteins, containing TNFR1-selective antagonistic TNF muteins, as described and provided herein. In all embodiments containing the Fc of trastuzumab or the Fc of nivolumab, the Fc regions optionally are modified to reduce or eliminate immune effector functions, including ADCC, ADCP, and CDC, and also, optionally are modified to enhance binding to FcRn, increasing the serum half-life of the fusion proteins. Fc modifications that reduce or eliminate immune effector functions are summarized in table 9, and Fc modifications that enhance FcRn binding are summarized in table 7. Any one or a combination of such modifications is included in the Fc regions of the fusion proteins provided herein.

[1555] 2a) TNF(R32W/S86T)-SCDKTH-Trastuzumab Fc

[1556] Provided herein is a human TNFR1 antagonist fusion protein, containing the TNFR1-selective antagonist TNF mutein with the mutations R32W/S86T, with reference to the sequence of soluble TNF, set forth in SEQ ID NO:2. The C-terminus of the TNF(R32W/S86T) mutein (SEQ ID NO:685) is fused to all or a portion of the hinge sequence of trastuzumab, containing at least residues SCDKTH (corresponding to residues 222-227 of SEQ ID NO:26), which is fused to the N-terminus of the trastuzumab Fc region (corresponding to residues 234-450 of SEQ ID NO:26; see, also SEQ ID NO:27). The TNF(R32W/S86T)-SCDKTH-Trastuzumab Fc fusion protein has the following sequence (SEQ ID NO:741):

VRSSSRTPSDKPVAHVVANPQAEGQLQWLNRWANA
LLANGVELRDNQLVVPSEGLYLIYSQVLFKGQGCP
STHVLLTHTISRIAVTYQTKVNLLSAIKSPCQRET
PEGAEAKPWYEPIYLGGVFQLEKGDRLSAEINRPD
YLDFAESGQVYFGIIALSCDKTHAPELLGGPSVFL
EPPKPKDTLMISRTPEVTCVVVDVSHEDPEVKFNW
YVDGVEVHNAKTKPREEQYNSTYRVVSVLTVLHQD
WLNGKEYKCKVSNKALPAPIEKTISKAKGQPREPQ
VYTLPPSREEMTKNQVSLTCLVKGFYPSDIAVEWE
SNGQPENNYKTTPPVLDSDGSFFLYSKLTVDKSRW
QQGNVFSCSVMHEALHNHYTQKSLSLSPGK

[1557] Alternatively, the SCDKTH hinge sequence is replaced by at least 5, 6, 7, 8, 9, 10, or 11 contiguous residues, up to the full sequence, of the hinge region of trastuzumab, containing the sequence EPKSCDKTHTCPPCP (corresponding to residues 219-233 of SEQ ID NO:26).

[1558] 2b) TNF(R32W/S86T)-GGGGSGGGGSGGGGS-Trastuzumab Fc

[1559] Provided herein is a TNFR1 antagonist fusion protein, containing the TNFR1-selective antagonist TNF mutein with the mutations R32W/S86T, with reference to the sequence of soluble TNF, set forth in SEQ ID NO:2. The C-terminus of the TNF(R32W/S86T) mutein (SEQ ID NO:685) is fused to a GGGGSGGGGSGGGGS peptide linker, which is fused to the N-terminus of the trastuzumab Fc region (corresponding to residues 234-450 of SEQ ID NO:26; see, also, SEQ ID NO:27). The TNF(R32W/S86T)-GGGGSGGGGSGGGGS-Trastuzumab Fc fusion protein has the following sequence (SEQ ID NO:742):

VRSSSRTPSDKPVAHVVANPQAEGQLQWLNRWANA
LLANGVELRDNQLVVPSEGLYLIYSQVLFKGQGCP
STHVLLTHTISRIAVTYQTKVNLLSAIKSPCQRET
PEGAEAKPWYEPIYLGGVFQLEKGDRLSAEINRPD
YLDFAESGQVYFGIIALGGGGSGGGGSGGGGSAPE
LLGGPSVFLEPPKPKDTLMISRTPEVTCVVVDVSH
EDPEVKFNWYVDGVEVHNAKTKPREEQYNSTYRVV
SVLTVLHQDWLNGKEYKCKVSNKALPAPIEKTISK
AKGQPREPQVYTLPPSREEMTKNQVSLTCLVKGFY
PSDIAVEWESNGQPENNYKTTPPVLDSDGSFFLYS
KLTVDKSRWQQGNVFSCSVMHEALHNHYTQKSLSL
SPGK

[1560] Alternatively, the GGGGSGGGGSGGGGS linker is replaced by a Gly-Ser linker, such as a (GSGS)ₙ or a (GGGGS)ₙ linker, where n=1, 2, 3, 4 or 5, or any other suitable short peptide linker as described herein or as known in the art.

[1561] 2c) TNF(R32W/S86T)-GGGGSGGGGSGGGGS-SCDKTH-Trastuzumab Fc

[1562] Provided herein is a TNFR1 antagonist fusion protein, containing the TNFR1-selective antagonist TNF mutein with the mutations R32W/S86T, with reference to the sequence of soluble TNF, set forth in SEQ ID NO:2. The C-terminus of the TNF(R32W/S86T) mutein (SEQ ID NO:685) is fused to a GGGGSGGGGSGGGGS peptide linker, which is fused to a portion of the hinge sequence of trastuzumab, containing at least residues SCDKTH (corresponding to residues 222-227 of SEQ ID NO:26), which is fused to the N-terminus of the trastuzumab Fc region (corresponding to residues 234-450 of SEQ ID NO:26; see, also, SEQ ID NO:27). The TNF(R32W/S86T)-GGGGSGGGGSGGGGS-SCDKTH-Trastuzumab Fc fusion protein has the following sequence (SEQ ID NO:743):

VRSSSRTPSDKPVAHVVANPQAEGQLQWLNRWANA
LLANGVELRDNQLVVPSEGLYLIYSQVLFKGQGCP
STHVLLTHTISRIAVTYQTKVNLLSAIKSPCQRET
PEGAEAKPWYEPIYLGGVFQLEKGDRLSAEINRPD
YLDFAESGQVYFGIIALGGGGSGGGGSGGGGSSCD
KTHAPELLGGPSVFLEPPKPKDTLMISRTPEVTCV
VVDVSHEDPEVKFNWYVDGVEVHNAKTKPREEQYN
STYRVVSVLTVLHQDWLNGKEYKCKVSNKALPAPI
EKTISKAKGQPREPQVYTLPPSREEMTKNQVSLTC
LVKGFYPSDIAVEWESNGQPENNYKTTPPVLDSDG
SFFLYSKLTVDKSRWQQGNVFSCSVMHEALHNHYT
QKSLSLSPGK

[1563] Alternatively, the GGGGSGGGGSGGGGS linker is replaced by a Gly-Ser linker, such as a (GSGS)ₙ or a (GGGGS)ₙ linker, where n=1, 2, 3, 4, or 5, or any other suitable short peptide linker as described herein or as known in the art. Alternatively, or additionally, the SCDKTH hinge sequence is replaced by the full sequence of the hinge region of trastuzumab, containing the sequence EPKSCDKTHTCPPCP (corresponding to residues 219-233 of SEQ ID NO:26), or a portion thereof containing at least 5, 6, 7, 8, 9, 10, or 11 contiguous residues.

[1564] 2d) TNF(V1M/R31C/C69V/Y87H/C101A/A145R)-SCDKTH-Trastuzumab Fc

[1565] Provided herein is a human TNFR1 antagonist fusion protein, containing the TNFR1-selective antagonist TNF mutein with the mutations V1M, R31C, C69V, Y87H, C101A and A145R, with reference to the sequence of soluble TNF, set forth in SEQ ID NO:2. The C-terminus of the TNF(V1M/R31C/C69V/Y87H/C101A/A145R) mutein (SEQ ID NO:701) is fused to a portion of the hinge sequence of trastuzumab, containing at least residues SCDKTH (corresponding to residues 222-227 of SEQ ID NO:26), which is fused to the N-terminus of the trastuzumab Fc region (corresponding to residues 234-450 of SEQ ID NO:26; see, also, SEQ ID NO:27). The TNF(V1M/R31C/C69V/Y87H/C101A/A145R)-SCDKTH-Trastuzumab Fc fusion protein has the following sequence (SEQ ID NO:744):

MRSSSRTPSDKPVAHVVANPQAEGQLQWLNCRANA
LLANGVELRDNQLVVPSEGLYLIYSQVLFKGQGVP
STHVLLTHTISRIAVSHQTKVNLLSAIKSPAQRET
PEGAEAKPWYEPIYLGGVFQLEKGDRLSAEINRPD
YLDFRESGQVYFGIIALSCDKTHAPELLGGPSVFL
EPPKPKDTLMISRTPEVTCVVVDVSHEDPEVKFNW
YVDGVEVHNAKTKPREEQYNSTYRVVSVLTVLHQD
WLNGKEYKCKVSNKALPAPIEKTISKAKGQPREPQ
VYTLPPSREEMTKNQVSLTCLVKGFYPSDIAVEWE
SNGQPENNYKTTPPVLDSDGSFFLYSKLTVDKSRW
QQGNVFSCSVMHEALHNHYTQKSLSLSPGK

[1566] Alternatively, the SCDKTH hinge sequence is replaced by the full sequence of the hinge region of trastuzumab, containing the sequence EPKSCDKTHTCPPCP (corresponding to residues 219-233 of SEQ ID NO:26), or a portion thereof containing at least 5, 6, 7, 8, 9, 10, or 11 contiguous residues.

[1567] 2e) TNF(V1M/R31C/C69V/Y87H/C101A/A145R)-GGGGSGGGGSGGGGS-Trastuzumab Fc

[1568] Provided herein is a TNFR1 antagonist fusion protein, containing the TNFR1-selective antagonist TNF mutein with the mutations V1M, R31C, C69V, Y87H, C101A and A145R, with reference to the sequence of soluble TNF, set forth in SEQ ID NO:2. The C-terminus of the TNF(V1M/R31C/C69V/Y87H/C101A/A145R) mutein (SEQ ID NO:701) is fused to a GGGGSGGGGSGGGGS peptide linker, which is fused to the N-terminus of the trastuzumab Fc region (corresponding to residues 234-450 of SEQ ID NO:26; see, also, SEQ ID NO:27). The TNF(V1M/R31C/C69V/Y87H/C101A/A145R)-GGGGSGGGGSGGGGS-Trastuzumab Fc fusion protein has the following sequence (SEQ ID NO:745):

MRSSSRTPSDKPVAHVVANPQAEGQLQWLNCRANA
LLANGVELRDNQLVVPSEGLYLIYSQVLFKGQGVP
STHVLLTHTISRIAVSHQTKVNLLSAIKSPAQRET
PEGAEAKPWYEPIYLGGVFQLEKGDRLSAEINRPD
YLDFRESGQVYFGIIALGGGGSGGGGSGGGGSAPE
LLGGPSVFLEPPKPKDTLMISRTPEVTCVVVDVSH
EDPEVKFNWYVDGVEVHNAKTKPREEQYNSTYRVV
SVLTVLHQDWLNGKEYKCKVSNKALPAPIEKTISK
AKGQPREPQVYTLPPSREEMTKNQVSLTCLVKGFY
PSDIAVEWESNGQPENNYKTTPPVLDSDGSFFLYS
KLTVDKSRWQQGNVFSCSVMHEALHNHYTQKSLSL
SPGK

[1569] Alternatively, the GGGGSGGGGSGGGGS linker is replaced by a Gly-Ser linker, such as a (GSGS)ₙ or a (GGGGS)ₙ linker, where n=1, 2, 3, 4 or 5, or any other suitable short peptide linker as described herein or as known in the art.

[1570] 2f) TNF(V1M/R31C/C69V/Y87H/C101A/A145R)-GGGGSGGGGSGGGGS-SCDKTH-Trastuzumab Fc

[1571] Provided herein is a TNFR1 antagonist fusion protein, containing the TNFR1-selective antagonist TNF mutein with the mutations V1M, R31C, C69V, Y87H, C101A and A145R, with reference to the sequence of soluble TNF, set forth in SEQ ID NO:2. The C-terminus of the TNF(V1M/R31C/C69V/Y87H/C101A/A145R) mutein (SEQ ID NO:701) is fused to a GGGGSGGGGSGGGGS peptide linker, which is fused to a portion of the hinge sequence of trastuzumab, containing at least residues SCDKTH (corresponding to residues 222-227 of SEQ ID NO:26), which is fused to the N-terminus of the trastuzumab Fc region (corresponding to residues 234-450 of SEQ ID NO:26; see, also, SEQ ID NO:27). The TNF(V1M/R31C/C69V/Y87H/C101A/A145R)-GGGGSGGGGSGGGGS-SCDKTH-Trastuzumab Fc fusion protein has the following sequence (SEQ ID NO:746):

MRSSSRTPSDKPVAHVVANPQAEGQLQWLNCRANA
LLANGVELRDNQLVVPSEGLYLIYSQVLFKGQGVP
STHVLLTHTISRIAVSHQTKVNLLSAIKSPAQRET
PEGAEAKPWYEPIYLGGVFQLEKGDRLSAEINRPD
YLDFRESGQVYFGIIALGGGGSGGGGSGGGGSSCD
KTHAPELLGGPSVFLEPPKPKDTLMISRTPEVTCV
VVDVSHEDPEVKFNWYVDGVEVHNAKTKPREEQYN
STYRVVSVLTVLHQDWLNGKEYKCKVSNKALPAPI
EKTISKAKGQPREPQVYTLPPSREEMTKNQVSLTC
LVKGFYPSDIAVEWESNGQPENNYKTTPPVLDSDG
SFFLYSKLTVDKSRWQQGNVFSCSVMHEALHNHYT
QKSLSLSPGK

[1572] Alternatively, the GGGGSGGGGSGGGGS linker is replaced by a Gly-Ser linker, such as a (GSGS)ₙ or a (GGGGS)ₙ linker, where n=1, 2, 3, 4, or 5, or any other suitable short peptide linker as described herein or as known in the art. Alternatively, or additionally, the SCDKTH hinge sequence is replaced by a portion containing at least 5, 6, 7, 8, 9, 10, or 11 contiguous residues, up to the full sequence, of the hinge region of trastuzumab, containing the sequence EPKSCDKTHTCPPCP (corresponding to residues 219-233 of SEQ ID NO:26).

[1573] 2g) TNF(A84S/V85T/S86T/Y87H/Q88N/T89Q)-SCDKTH-Trastuzumab Fc

[1574] Provided herein is a human TNFR1 antagonist fusion protein, containing the TNFR1-selective antagonist TNF mutein with the mutations A84S, V85T, S86T, Y87H, Q88N and T89Q, with reference to the sequence of soluble TNF, set forth in SEQ ID NO:2. The C-terminus of the TNF(A84S/V85T/S86T/Y87H/Q88N/T89Q) mutein (SEQ ID NO:703) is fused to a portion of the hinge sequence of trastuzumab, containing at least residues SCDKTH (corresponding to residues 222-227 of SEQ ID NO:26), which is fused to the N-terminus of the trastuzumab Fc region (corresponding to residues 234-450 of SEQ ID NO:26; see, also, SEQ ID NO:27). The TNF(A84S/V85T/S86T/Y87H/Q88N/T89Q)-SCDKTH-Trastuzumab Fc fusion protein has the following sequence (SEQ ID NO:747):

VRSSSRTPSDKPVAHVVANPQAEGQLQWLNRRANA
LLANGVELRDNQLVVPSEGLYLIYSQVLFKGQGCP
STHVLLTHTISRISTTHNQKVNLLSAIKSPCQRET
PEGAEAKPWYEPIYLGGVFQLEKGDRLSAEINRPD
YLDFAESGQVYFGIIALSCDKTHAPELLGGPSVFL
EPPKPKDTLMISRTPEVTCVVVDVSHEDPEVKFNW
YVDGVEVHNAKTKPREEQYNSTYRVVSVLTVLHQD
WLNGKEYKCKVSNKALPAPIEKTISKAKGQPREPQ
VYTLPPSREEMTKNQVSLTCLVKGFYPSDIAVEWE
SNGQPENNYKTTPPVLDSDGSFFLYSKLTVDKSRW
QQGNVFSCSVMHEALHNHYTQKSLSLSPGK

[1575] Alternatively, the SCDKTH hinge sequence is replaced by a portion containing at least 5, 6, 7, 8, 9, 10, or 11 contiguous residues, up to the full sequence, of the hinge region of trastuzumab, containing the sequence EPKSCDKTHTCPPCP (corresponding to residues 219-233 of SEQ ID NO:26).

[1576] 2h) TNF(A84S/V85T/S86T/Y87H/Q88N/T89Q)-GGGGSGGGGSGGGGS-Trastuzumab Fc

[1577] Provided herein is a TNFR1 antagonist fusion protein, containing the TNFR1-selective antagonist TNF mutein with the mutations A84S, V85T, S86T, Y87H, Q88N and T89Q, with reference to the sequence of soluble TNF, set forth in SEQ ID NO:2. The C-terminus of the TNF(A84S/V85T/S86T/Y87H/Q88N/T89Q) mutein (SEQ ID NO:703) is fused to a GGGGSGGGGSGGGGS peptide linker, which is fused to the N-terminus of the trastuzumab Fc region (corresponding to residues 234-450 of SEQ ID NO:26; see, also, SEQ ID NO:27). The TNF(A84S/V85T/S86T/Y87H/Q88N/T89Q)-GGGGSGGGGSGGGGS-Trastuzumab Fc fusion protein has the following sequence (SEQ ID NO:748):

VRSSSRTPSDKPVAHVVANPQAEGQLQWLNRRANA
LLANGVELRDNQLVVPSEGLYLIYSQVLFKGQGCP
STHVLLTHTISRISTTHNQKVNLLSAIKSPCQRET
PEGAEAKPWYEPIYLGGVFQLEKGDRLSAEINRPD
YLDFAESGQVYFGIIALGGGGSGGGGSGGGGSAPE
LLGGPSVFLEPPKPKDTLMISRTPEVTCVVVDVSH
EDPEVKFNWYVDGVEVHNAKTKPREEQYNSTYRVV
SVLTVLHQDWLNGKEYKCKVSNKALPAPIEKTISK
AKGQPREPQVYTLPPSREEMTKNQVSLTCLVKGFY
PSDIAVEWESNGQPENNYKTTPPVLDSDGSFELYS
KLTVDKSRWQQGNVESCSVMHEALHNHYTQKSLSL
SPGK

[1578] Alternatively, the GGGGSGGGGSGGGGS linker is replaced by a Gly-Ser linker, such as a (GSGS)ₙ or a (GGGGS)ₙ linker, where n=1, 2, 3, 4, or 5, or any other suitable short peptide linker as described herein or as known in the art.

[1579] 2i) TNF(A84S/V85T/S86T/Y87H/Q88N/T89Q)-GGGGSGGGGSGGGGS-SCDKTH-Trastuzumab Fc

[1580] Provided herein is a TNFR1 antagonist fusion protein, containing the TNFR1-selective antagonist TNF mutein with the mutations A84S, V85T, S86T, Y87H, Q88N and T89Q, with reference to the sequence of soluble TNF, set forth in SEQ ID NO:2. The C-terminus of the TNF(A84S/V85T/S86T/Y87H/Q88N/T89Q) mutein (SEQ ID NO:703) is fused to a GGGGSGGGGSGGGGS peptide linker, which is fused to a portion of the hinge sequence of trastuzumab, containing at least residues SCDKTH (corresponding to residues 222-227 of SEQ ID NO:26), which is fused to the N-terminus of the trastuzumab Fc region (corresponding to residues 234-450 of SEQ ID NO:26; see, also, SEQ ID NO:27). The TNF(A84S/V85T/S86T/Y87H/Q88N/T89Q)-GGGGSGGGGSGGGGS-SCDKTH-Trastuzumab Fc fusion protein has the following sequence (SEQ ID NO:749):

VRSSSRTPSDKPVAHVVANPQAEGQLQWLNRRANA
LLANGVELRDNQLVVPSEGLYLIYSQVLFKGQGCP
STHVLLTHTISRISTTHNQKVNLLSAIKSPCQRET
PEGAEAKPWYEPIYLGGVFQLEKGDRLSAEINRPD
YLDFAESGQVYFGIIALGGGGSGGGGSGGGGSSCD
KTHAPELLGGPSVFLEPPKPKDTLMISRTPEVTCV
VVDVSHEDPEVKFNWYVDGVEVHNAKTKPREEQYN
STYRVVSVLTVLHQDWLNGKEYKCKVSNKALPAPI
EKTISKAKGQPREPQVYTLPPSREEMTKNQVSLTC
LVKGFYPSDIAVEWESNGQPENNYKTTPPVLDSDG
SFFLYSKLTVDKSRWQQGNVFSCSVMHEALHNHYT
QKSLSLSPGK

[1581] Alternatively, the GGGGSGGGGSGGGGS linker is replaced by a Gly-Ser linker, such as a (GSGS)ₙ or a (GGGGS)ₙ linker, where n=1, 2, 3, 4, or 5, or any other suitable short peptide linker as described herein or as known in the art. Alternatively, or additionally, the SCDKTH hinge sequence is replaced by the full sequence of the hinge region of trastuzumab, containing the sequence EPKSCDKTHTCPPCP (corresponding to residues 219-233 of SEQ ID NO:26), or a portion thereof containing at least 5, 6, 7, 8, 9, 10, or 11 contiguous residues.

[1582] 2j) TNF(I97T/A145R)-SCDKTH-Trastuzumab Fc

[1583] Provided herein is a human TNFR1 antagonist fusion protein, containing the TNFR1-selective antagonist TNF mutein with the mutations I97T/A145R, with reference to the sequence of soluble TNF, set forth in SEQ ID NO:2. The C-terminus of the TNF(I97T/A145R) mutein (SEQ ID NO:702) is fused to all or a portion of the hinge sequence of trastuzumab, containing at least residues SCDKTH (corresponding to residues 222-227 of SEQ ID NO:26), which is fused to the N-terminus of the trastuzumab Fc region (corresponding to residues 234-450 of SEQ ID NO:26; see, also, SEQ ID NO:27). The TNF(I97T/A145R)-SCDKTH-Trastuzumab Fc fusion protein has the following sequence (SEQ ID NO:750):

VRSSSRTPSDKPVAHVVANPQAEGQLQWLNRRANA
LLANGVELRDNQLVVPSEGLYLIYSQVLFKGQGCP
STHVLLTHTISRIAVSYQTKVNLLSATKSPCQRET
PEGAEAKPWYEPIYLGGVFQLEKGDRLSAEINRPD
YLDFRESGQVYFGIIALSCDKTHAPELLGGPSVFL
EPPKPKDTLMISRTPEVTCVVVDVSHEDPEVKFNW
YVDGVEVHNAKTKPREEQYNSTYRVVSVLTVLHQD
WLNGKEYKCKVSNKALPAPIEKTISKAKGQPREPQ
VYTLPPSREEMTKNQVSLTCLVKGFYPSDIAVEWE
SNGQPENNYKTTPPVLDSDGSFFLYSKLTVDKSRW
QQGNVFSCSVMHEALHNHYTQKSLSLSPGK

[1584] Alternatively, the SCDKTH hinge sequence is replaced by the full sequence of the hinge region of trastuzumab, containing the sequence EPKSCDKTHTCPPCP (corresponding to residues 219-233 of SEQ ID NO:26), or a portion thereof containing at least at least 5, 6, 7, 8, 9, 10, or 11 contiguous residues.

[1585] 2k) TNF(I97T/A145R)-GGGGSGGGGSGGGGS-Trastuzumab Fc

[1586] Provided herein is a TNFR1 antagonist fusion protein, containing the TNFR1-selective antagonist TNF mutein with the mutations I97T/A145R, with reference to the sequence of soluble TNF, set forth in SEQ ID NO:2. The C-terminus of the TNF(I97T/A145R) mutein (SEQ ID NO:702) is fused to a GGGGSGGGGSGGGGS peptide linker, which is fused to the N-terminus of the trastuzumab Fc region (corresponding to residues 234-450 of SEQ ID NO:26; see, also, SEQ ID NO:27). The TNF(I97T/A145R)-GGGGSGGGGSGGGGS-Trastuzumab Fc fusion protein has the following sequence (SEQ ID NO:751):

VRSSSRTPSDKPVAHVVANPQAEGQLQWLNRRANA
LLANGVELRDNQLVVPSEGLYLIYSQVLFKGQGCP
STHVLLTHTISRIAVSYQTKVNLLSATKSPCQRET
PEGAEAKPWYEPIYLGGVFQLEKGDRLSAEINRPD
YLDFRESGQVYFGIIALGGGGSGGGGSGGGGSAPE
LLGGPSVFLEPPKPKDTLMISRTPEVTCVVVDVSH
EDPEVKFNWYVDGVEVHNAKTKPREEQYNSTYRVV
SVLTVLHQDWLNGKEYKCKVSNKALPAPIEKTISK
AKGQPREPQVYTLPPSREEMTKNQVSLTCLVKGFY
PSDIAVEWESNGQPENNYKTTPPVLDSDGSFFLYS
KLTVDKSRWQQGNVFSCSVMHEALHNHYTQKSLSL
SPGK

[1587] Alternatively, the GGGGSGGGGSGGGGS linker is replaced by a Gly-Ser linker, such as a (GSGS)ₙ or a (GGGGS)ₙ linker, where n=1, 2, 3, 4, or 5, or any other suitable short peptide linker as described herein or as known in the art.

[1588] 2l) TNF(I97T/A145R)-GGGGSGGGGSGGGGS-SCDKTH-Trastuzumab Fc

[1589] Provided herein is a TNFR1 antagonist fusion protein, containing the TNFR1-selective antagonist TNF mutein with the mutations I97T/A145R, with reference to the sequence of soluble TNF, set forth in SEQ ID NO:2. The C-terminus of the TNF(I97T/A145R) mutein (SEQ ID NO:702) is fused to a GGGGSGGGGSGGGGS peptide linker, which is fused to a portion of the hinge sequence of trastuzumab, containing at least residues SCDKTH (corresponding to residues 222-227 of SEQ ID NO:26), which is fused to the N-terminus of the trastuzumab Fc region (corresponding to residues 234-450 of SEQ ID NO:26; see, also, SEQ ID NO:27). The TNF(I97T/A145R)-GGGGSGGGGSGGGGS-SCDKTH-Trastuzumab Fc fusion protein has the following sequence (SEQ ID NO:752):

VRSSSRTPSDKPVAHVVANPQAEGQLQWLNRRANA
LLANGVELRDNQLVVPSEGLYLIYSQVLFKGQGCP
STHVLLTHTISRIAVSYQTKVNLLSATKSPCQRET
PEGAEAKPWYEPIYLGGVFQLEKGDRLSAEINRPD
YLDFRESGQVYFGIIALGGGGSGGGGSGGGGSSCD
KTHAPELLGGPSVFLEPPKPKDTLMISRTPEVTCV
VVDVSHEDPEVKFNWYVDGVEVHNAKTKPREEQYN
STYRVVSVLTVLHQDWLNGKEYKCKVSNKALPAPI
EKTISKAKGQPREPQVYTLPPSREEMTKNQVSLTC
LVKGFYPSDIAVEWESNGQPENNYKTTPPVLDSDG
SFFLYSKLTVDKSRWQQGNVFSCSVMHEALHNHYT
QKSLSLSPGK

[1590] Alternatively, the GGGGSGGGGSGGGGS linker is replaced by a Gly-Ser linker, such as a (GSGS)ₙ or a (GGGGS)ₙ linker, where n=1, 2, 3, 4, or 5, or any other suitable short peptide linker as described herein or as known in the art. Alternatively, or additionally, the SCDKTH hinge sequence is replaced by the full sequence of the hinge region of trastuzumab, containing the sequence EPKSCDKTHTCPPCP (corresponding to residues 219-233 of SEQ ID NO:26), or a portion thereof containing at least 5, 6, 7, 8, 9, 10, or 11 contiguous residues.

[1591] 2m) TNF(R32W/S86T)-ESKYGPPCPPCP-Nivolumab Fc

[1592] Provided herein is a human TNFR1 antagonist fusion protein construct, containing the TNFR1-selective antagonist TNF mutein with the mutations R32W/S86T, with reference to the sequence of soluble TNF, set forth in SEQ ID NO:2. The C-terminus of the TNF(R32W/S86T) mutein (SEQ ID NO:685) is fused to the hinge sequence of nivolumab, containing residues ESKYGPPCPPCP (corresponding to residues 212-223 of SEQ ID NO:29), which is fused to the N-terminus of the Nivolumab Fc region (corresponding to residues 224-440 of SEQ ID NO:29; see, also, SEQ ID NO:30). The TNF(R32W/S86T)-ESKYGPPCPPCP-Nivolumab Fc fusion protein has the following sequence (SEQ ID NO:753):

VRSSSRTPSDKPVAHVVANPQAEGQLQWLNRWANA
LLANGVELRDNQLVVPSEGLYLIYSQVLFKGQGCP
STHVLLTHTISRIAVTYQTKVNLLSAIKSPCQRET
PEGAEAKPWYEPIYLGGVFQLEKGDRLSAEINRPD
YLDFAESGQVYEGIIALESKYGPPCPPCPAPEFLG
GPSVFLEPPKPKDTLMISRTPEVTCVVVDVSQEDP
EVQFNWYVDGVEVHNAKTKPREEQFNSTYRVVSVL
TVLHQDWLNGKEYKCKVSNKGLPSSIEKTISKAKG
QPREPQVYTLPPSQEEMTKNQVSLTCLVKGFYPSD
IAVEWESNGQPENNYKTTPPVLDSDGSFFLYSRLT
VDKSRWQEGNVFSCSVMHEALHNHYTQKSLSLSLG
K

[1593] Alternatively, all or a portion of the nivolumab hinge sequence, containing at least 5, 6, 7, 8, 9, 10, or 11 contiguous residues of the ESKYGPPCPPCP hinge sequence (corresponding to residues 212-223 of SEQ ID NO:29), is included.

[1594] 2n) TNF(R32W/S86T)-GGGGSGGGGSGGGGS-Nivolumab Fc

[1595] Provided herein is a TNFR1 antagonist fusion protein, containing the TNFR1-selective antagonist TNF mutein with the mutations R32W/S86T, with reference to the sequence of soluble TNF, set forth in SEQ ID NO:2. The C-terminus of the TNF(R32W/S86T) mutein (SEQ ID NO:685) is fused to a GGGGSGGGGSGGGGS peptide linker, which is fused to the N-terminus of the nivolumab Fc region (corresponding to residues 224-440 of SEQ ID NO:29; see, also, SEQ ID NO:30). The TNF(R32W/S86T)-GGGGSGGGGSGGGGS-Nivolumab Fc fusion protein has the following sequence (SEQ ID NO:754):

VRSSSRTPSDKPVAHVVANPQAEGQLQWLNRWANA
LLANGVELRDNQLVVPSEGLYLIYSQVLFKGQGCP
STHVLLTHTISRIAVTYQTKVNLLSAIKSPCQRET
PEGAEAKPWYEPIYLGGVFQLEKGDRLSAEINRPD
YLDFAESGQVYEGIIALGGGGSGGGGSGGGGSAPE
FLGGPSVFLEPPKPKDTLMISRTPEVTCVVVDVSQ
EDPEVQFNWYVDGVEVHNAKTKPREEQFNSTYRVV
SVLTVLHQDWLNGKEYKCKVSNKGLPSSIEKTISK
AKGQPREPQVYTLPPSQEEMTKNQVSLTCLVKGFY
PSDIAVEWESNGQPENNYKTTPPVLDSDGSFELYS
RLTVDKSRWQEGNVESCSVMHEALHNHYTQKSLSL
SLGK

[1596] Alternatively, the GGGGSGGGGSGGGGS linker is replaced by a Gly-Ser linker, such as a (GSGS)ₙ or a (GGGGS)ₙ linker, where n=1, 2, 3, 4, or 5, or any other suitable short peptide linker as described herein or as known in the art.

[1597] 2o) TNF(R32W/S86T)-GGGGSGGGGSGGGGS-ESKYGPPCPPCP-Nivolumab Fc

[1598] Provided herein is a TNFR1 antagonist fusion protein, containing the TNFR1-selective antagonist TNF mutein with the mutations R32W/S86T, with reference to the sequence of soluble TNF, set forth in SEQ ID NO:2. The C-terminus of the TNF(R32W/S86T) mutein (SEQ ID NO:685) is fused to a GGGGSGGGGSGGGGS peptide linker, which is fused to the hinge sequence of nivolumab, containing the sequence ESKYGPPCPPCP (corresponding to residues 212-223 of SEQ ID NO:29), which is fused to the N-terminus of the nivolumab Fc region (corresponding to residues 224-440 of SEQ ID NO:29; see, also, SEQ ID NO:30). The TNF(R32W/S86T)-GGGGSGGGGSGGGGS-ESKYGPPCPPCP-Nivolumab Fc fusion protein has the following sequence (SEQ ID NO:755):

VRSSSRTPSDKPVAHVVANPQAEGQLQWLNRWANA
LLANGVELRDNQLVVPSEGLYLIYSQVLFKGQGCP
STHVLLTHTISRIAVTYQTKVNLLSAIKSPCQRET
PEGAEAKPWYEPIYLGGVFQLEKGDRLSAEINRPD
YLDFAESGQVYFGIIALGGGGSGGGGSGGGGSESK
YGPPCPPCPAPEFLGGPSVFLEPPKPKDTLMISRT
PEVTCVVVDVSQEDPEVQFNWYVDGVEVHNAKTKP
REEQFNSTYRVVSVLTVLHQDWLNGKEYKCKVSNK
GLPSSIEKTISKAKGQPREPQVYTLPPSQEEMTKN
QVSLTCLVKGFYPSDIAVEWESNGQPENNYKTTPP
VLDSDGSFFLYSRLTVDKSRWQEGNVFSCSVMHEA
LHNHYTQKSLSLSLGK

[1599] Alternatively, the GGGGSGGGGSGGGGS linker is replaced by a Gly-Ser linker, such as a (GSGS)ₙ or a (GGGGS)ₙ linker, where n=1, 2, 3, 4, or 5, or any other suitable short peptide linker as described herein or as known in the art. Alternatively, or additionally, a portion of the nivolumab hinge sequence, containing at least at least 5, 6, 7, 8, 9, 10, or 11 contiguous residues of the ESKYGPPCPPCP hinge sequence (corresponding to residues 212-223 of SEQ ID NO:29), is included.

[1600] 2p) TNF(V1M/R31C/C69V/Y87H/C101A/A145R)-ESKYGPPCPPCP-Nivolumab Fc

[1601] Provided herein is a human TNFR1 antagonist fusion protein, containing the TNFR1-selective antagonist TNF mutein with the mutations V1M, R31C, C69V, Y87H, C101A and A145R, with reference to the sequence of soluble TNF, set forth in SEQ ID NO:2. The C-terminus of the TNF(V1M/R31C/C69V/Y87H/C101A/A145R) mutein (SEQ ID NO:701) is fused to the hinge sequence of nivolumab, containing the sequence ESKYGPPCPPCP (corresponding to residues 212-223 of SEQ ID NO:29), which is fused to the N-terminus of the nivolumab Fc region (corresponding to residues 224-440 of SEQ ID NO:29; see, also, SEQ ID NO:30). The TNF(V1M/R31C/C69V/Y87H/C101A/A145R)-ESKYGPPCPPCP-Nivolumab Fc fusion protein has the following sequence (SEQ ID NO:756):

MRSSSRTPSDKPVAHVVANPQAEGQLQWLNCRANA
LLANGVELRDNQLVVPSEGLYLIYSQVLFKGQGVP
STHVLLTHTISRIAVSHQTKVNLLSAIKSPAQRET
PEGAEAKPWYEPIYLGGVFQLEKGDRLSAEINRPD
YLDFRESGQVYFGIIALESKYGPPCPPCPAPEFLG
GPSVFLFPPKPKDTLMISRTPEVTCVVVDVSQEDP
EVQFNWYVDGVEVHNAKTKPREEQFNSTYRVVSVL
TVLHQDWLNGKEYKCKVSNKGLPSSIEKTISKAKG
QPREPQVYTLPPSQEEMTKNQVSLTCLVKGFYPSD
IAVEWESNGQPENNYKTTPPVLDSDGSFFLYSRLT
VDKSRWQEGNVFSCSVMHEALHNHYTQKSLSLSLG
K

[1602] Alternatively, all or a portion of the nivolumab hinge sequence, containing at least 5, 6, 7, 8, 9, 10, or 11 contiguous residues of the ESKYGPPCPPCP hinge sequence (corresponding to residues 212-223 of SEQ ID NO:29), is included.

[1603] 2q) TNF(V1M/R31C/C69V/Y87H/C101A/A145R)-GGGGSGGGGSGGGGS-Nivolumab Fc

[1604] Provided herein is a TNFR1 antagonist fusion protein, containing the TNFR1-selective antagonist TNF mutein with the mutations V1M, R31C, C69V, Y87H, C101A and A145R, with reference to the sequence of soluble TNF, set forth in SEQ ID NO:2. The C-terminus of the TNF(V1M/R31C/C69V/Y87H/C101A/A145R) mutein (SEQ ID NO:701) is fused to a GGGGSGGGGSGGGGS peptide linker, which is fused to the N-terminus of the nivolumab Fc region (corresponding to residues 224-440 of SEQ ID NO:29; see, also, SEQ ID NO:30). The TNF(V1M/R31C/C69V/Y87H/C101A/A145R)-GGGGSGGGGSGGGGS-Nivolumab Fc fusion protein has the following sequence (SEQ ID NO:757):

MRSSSRTPSDKPVAHVVANPQAEGQLQWLNCRANA
LLANGVELRDNQLVVPSEGLYLIYSQVLFKGQGVP
STHVLLTHTISRIAVSHQTKVNLLSAIKSPAQRET
PEGAEAKPWYEPIYLGGVFQLEKGDRLSAEINRPD
YLDFRESGQVYFGIIALGGGGSGGGGSGGGGSAPE
FLGGPSVFLEPPKPKDTLMISRTPEVTCVVVDVSQ
EDPEVQFNWYVDGVEVHNAKTKPREEQFNSTYRVV
SVLTVLHQDWLNGKEYKCKVSNKGLPSSIEKTISK
AKGQPREPQVYTLPPSQEEMTKNQVSLTCLVKGFY
PSDIAVEWESNGQPENNYKTTPPVLDSDGSFELYS
RLTVDKSRWQEGNVESCSVMHEALHNHYTQKSLSL
SLGK

[1605] Alternatively, the GGGGSGGGGSGGGGS linker is replaced by a Gly-Ser linker, such as a (GSGS)ₙ or a (GGGGS)ₙ linker, where n=1, 2, 3, 4, or 5, or any other suitable short peptide linker as described herein or as known in the art.

[1606] 2r) TNF(V1M/R31C/C69V/Y87H/C101A/A145R)-GGGGSGGGGSGGGGS-ESKYGPPCPPCP-Nivolumab Fc

[1607] Provided herein is a TNFR1 antagonist fusion protein, containing the TNFR1-selective antagonist TNF mutein with the mutations V1M, R31C, C69V, Y87H, C101A and A145R, with reference to the sequence of soluble TNF, set forth in SEQ ID NO:2. The C-terminus of the TNF(V1M/R31C/C69V/Y87H/C101A/A145R) mutein (SEQ ID NO:701) is fused to a GGGGSGGGGSGGGGS peptide linker, which is fused to the hinge sequence of nivolumab, containing the sequence ESKYGPPCPPCP (corresponding to residues 212-223 of SEQ ID NO:29), which is fused to the N-terminus of the nivolumab Fc region (corresponding to residues 224-440 of SEQ ID NO:29; see, also, SEQ ID NO:30). The TNF(V1M/R31C/C69V/Y87H/C101A/A145R)-GGGGSGGGGSGGGGS-ESKYGPPCPPCP-Nivolumab Fc fusion protein has the following sequence (SEQ ID NO:758):

MRSSSRTPSDKPVAHVVANPQAEGQLQWLNCRANA
LLANGVELRDNQLVVPSEGLYLIYSQVLFKGQGVP
STHVLLTHTISRIAVSHQTKVNLLSAIKSPAQRET
PEGAEAKPWYEPIYLGGVFQLEKGDRLSAEINRPD
YLDFRESGQVYFGIIALGGGGSGGGGSGGGGSESK
YGPPCPPCPAPEFLGGPSVFLEPPKPKDTLMISRT
PEVTCVVVDVSQEDPEVQFNWYVDGVEVHNAKTKP
REEQFNSTYRVVSVLTVLHQDWLNGKEYKCKVSNK
GLPSSIEKTISKAKGQPREPQVYTLPPSQEEMTKN
QVSLTCLVKGFYPSDIAVEWESNGQPENNYKTTPP
VLDSDGSFFLYSRLTVDKSRWQEGNVFSCSVMHEA
LHNHYTQKSLSLSLGK

[1608] Alternatively, the GGGGSGGGGSGGGGS linker is replaced by a Gly-Ser linker, such as a (GSGS)ₙ or a (GGGGS)ₙ linker, where n=1, 2, 3, 4, or 5, or any other suitable short peptide linker as described herein or as known in the art. Alternatively, or additionally, all or a portion of the nivolumab hinge sequence, containing at least 5, 6, 7, 8, 9, 10, or 11 contiguous residues of the ESKYGPPCPPCP hinge sequence (corresponding to residues 212-223 of SEQ ID NO:29), is included.

[1609] 2s) TNF(A84S/V85T/S86T/Y87H/Q88N/T89Q)-ESKYGPPCPPCP-Nivolumab Fc

[1610] Provided herein is a human TNFR1 antagonist fusion protein, containing the TNFR1-selective antagonist TNF mutein with the mutations A84S, V85T, S86T, Y87H, Q88N and T89Q, with reference to the sequence of soluble TNF, set forth in SEQ ID NO:2. The C-terminus of the TNF(A84S/V85T/S86T/Y87H/Q88N/T89Q) mutein (SEQ ID NO:703) is fused to the hinge sequence of nivolumab, containing the sequence ESKYGPPCPPCP (corresponding to residues 212-223 of SEQ ID NO:29), which is fused to the N-terminus of the nivolumab Fc region (corresponding to residues 224-440 of SEQ ID NO:29; see, also, SEQ ID NO:30). The TNF(A84S/V85T/S86T/Y87H/Q88N/T89Q)-ESKYGPPCPPCP-Nivolumab Fc fusion protein has the following sequence (SEQ ID NO:759):

VRSSSRTPSDKPVAHVVANPQAEGQLQWLNRRANA
LLANGVELRDNQLVVPSEGLYLIYSQVLFKGQGCP
STHVLLTHTISRISTTHNQKVNLLSAIKSPCQRET
PEGAEAKPWYEPIYLGGVFQLEKGDRLSAEINRPD
YLDFAESGQVYFGIIALESKYGPPCPPCPAPEFLG
GPSVFLFPPKPKDTLMISRTPEVTCVVVDVSQEDP
EVQFNWYVDGVEVHNAKTKPREEQFNSTYRVVSVL
TVLHQDWLNGKEYKCKVSNKGLPSSIEKTISKAKG
QPREPQVYTLPPSQEEMTKNQVSLTCLVKGFYPSD
IAVEWESNGQPENNYKTTPPVLDSDGSFFLYSRLT
VDKSRWQEGNVFSCSVMHEALHNHYTQKSLSLSLG
K

[1611] Alternatively, all or a portion of the nivolumab hinge sequence, containing at least 5, 6, 7, 8, 9, 10, or 11 contiguous residues of the ESKYGPPCPPCP hinge sequence (corresponding to residues 212-223 of SEQ ID NO:29), is included.

[1612] 2t) TNF(A84S/V85T/S86T/Y87H/Q88N/T89Q)-GGGGSGGGGSGGGGS-Nivolumab Fc

[1613] Provided herein is a TNFR1 antagonist fusion protein, containing the TNFR1-selective antagonist TNF mutein with the mutations A84S, V85T, S86T, Y87H, Q88N and T89Q, with reference to the sequence of soluble TNF, set forth in SEQ ID NO:2. The C-terminus of the TNF(A84S/V85T/S86T/Y87H/Q88N/T89Q) mutein (SEQ ID NO:703) is fused to a GGGGSGGGGSGGGGS peptide linker, which is fused to the N-terminus of the nivolumab Fc region (corresponding to residues 224-440 of SEQ ID NO:29; see, also, SEQ ID NO:30). The TNF(A84S/V85T/S86T/Y87H/Q88N/T89Q)-GGGGSGGGGSGGGGS-Nivolumab Fc fusion protein has the following sequence (SEQ ID NO:760):

VRSSSRTPSDKPVAHVVANPQAEGQLQWLNRRANA
LLANGVELRDNQLVVPSEGLYLIYSQVLFKGQGCP
STHVLLTHTISRISTTHNQKVNLLSAIKSPCQRET
PEGAEAKPWYEPIYLGGVFQLEKGDRLSAEINRPD
YLDFAESGQVYFGIIALGGGGSGGGGSGGGGSAPE
FLGGPSVFLFPPKPKDTLMISRTPEVTCVVVDVSQ
EDPEVQFNWYVDGVEVHNAKTKPREEQFNSTYRVV
SVLTVLHQDWLNGKEYKCKVSNKGLPSSIEKTISK
AKGQPREPQVYTLPPSQEEMTKNQVSLTCLVKGFY
PSDIAVEWESNGQPENNYKTTPPVLDSDGSFFLYS
RLTVDKSRWQEGNVFSCSVMHEALHNHYTQKSLSL
SLGK

[1614] Alternatively, the GGGGSGGGGSGGGGS linker is replaced by a Gly-Ser linker, such as a (GSGS)ₙ or a (GGGGS)ₙ linker, where n=1, 2, 3, 4, or 5, or any other suitable short peptide linker as described herein or as known in the art.

[1615] 2u) TNF(A84S/V85T/S86T/Y87H/Q88N/T89Q)-GGGGSGGGGSGGGGS-ESKYGPPCPPCP-Nivolumab Fc

[1616] Provided herein is a TNFR1 antagonist fusion protein, containing the TNFR1-selective antagonist TNF mutein with the mutations A84S, V85T, S86T, Y87H, Q88N and T89Q, with reference to the sequence of soluble TNF, set forth in SEQ ID NO:2. The C-terminus of the TNF(A84S/V85T/S86T/Y87H/Q88N/T89Q) mutein (SEQ ID NO:703) is fused to a GGGGSGGGGSGGGGS peptide linker, which is fused to the hinge sequence of nivolumab, containing the sequence ESKYGPPCPPCP (corresponding to residues 212-223 of SEQ ID NO:29), which is fused to the N-terminus of the nivolumab Fc region (corresponding to residues 224-440 of SEQ ID NO:29; see, also, SEQ ID NO:30). The TNF(A84S/V85T/S86T/Y87H/Q88N/T89Q)-GGGGSGGGGSGGGGS-ESKYGPPCPPCP-Nivolumab Fc fusion protein has the following sequence (SEQ ID NO:761):

VRSSSRTPSDKPVAHVVANPQAEGQLQWLNRRANA
LLANGVELRDNQLVVPSEGLYLIYSQVLFKGQGCP
STHVLLTHTISRISTTHNQKVNLLSAIKSPCQRET
PEGAEAKPWYEPIYLGGVFQLEKGDRLSAEINRPD
YLDFAESGQVYFGIIALGGGGSGGGGSGGGGSESK
YGPPCPPCPAPEFLGGPSVFLEPPKPKDTLMISRT
PEVTCVVVDVSQEDPEVQFNWYVDGVEVHNAKTKP
REEQFNSTYRVVSVLTVLHQDWLNGKEYKCKVSNK
GLPSSIEKTISKAKGQPREPQVYTLPPSQEEMTKN
QVSLTCLVKGFYPSDIAVEWESNGQPENNYKTTPP
VLDSDGSFFLYSRLTVDKSRWQEGNVFSCSVMHEA
LHNHYTQKSLSLSLGK

[1617] Alternatively, the GGGGSGGGGSGGGGS linker is replaced by a Gly-Ser linker, such as a (GSGS)ₙ or a (GGGGS)ₙ linker, where n=1, 2, 3, 4, or 5, or any other suitable short peptide linker as described herein or as known in the art. Alternatively, or additionally, all or a portion of the nivolumab hinge sequence, containing at least 5, 6, 7, 8, 9, 10, or 11 contiguous residues of the ESKYGPPCPPCP hinge sequence (corresponding to residues 212-223 of SEQ ID NO:29), is included.

[1618] 2v) TNF(I97T/A145R)-ESKYGPPCPPCP-Nivolumab Fc

[1619] Provided herein is a human TNFR1 antagonist fusion protein, containing the TNFR1-selective antagonist TNF mutein with the mutations I97T/A145R, with reference to the sequence of soluble TNF, set forth in SEQ ID NO:2. The C-terminus of the TNF(I97T/A145R) mutein (SEQ ID NO:702) is fused to the hinge sequence of nivolumab, containing the sequence ESKYGPPCPPCP (corresponding to residues 212-223 of SEQ ID NO:29), which is fused to the N-terminus of the nivolumab Fc region (corresponding to residues 224-440 of SEQ ID NO:29; see, also, SEQ ID NO:30). The TNF(I97T/A145R)-ESKYGPPCPPCP-Nivolumab Fc fusion protein has the following sequence (SEQ ID NO:762):

VRSSSRTPSDKPVAHVVANPQAEGQLQWLNRRANA
LLANGVELRDNQLVVPSEGLYLIYSQVLFKGQGCP
STHVLLTHTISRIAVSYQTKVNLLSATKSPCQRET
PEGAEAKPWYEPIYLGGVFQLEKGDRLSAEINRPD
YLDFRESGQVYFGIIALESKYGPPCPPCPAPEFLG
GPSVFLEPPKPKDTLMISRTPEVTCVVVDVSQEDP
EVQFNWYVDGVEVHNAKTKPREEQFNSTYRVVSVL
TVLHQDWLNGKEYKCKVSNKGLPSSIEKTISKAKG
QPREPQVYTLPPSQEEMTKNQVSLTCLVKGFYPSD
IAVEWESNGQPENNYKTTPPVLDSDGSFFLYSRLT
VDKSRWQEGNVFSCSVMHEALHNHYTQKSLSLSLG
K

[1620] Alternatively, all or a portion of the nivolumab hinge sequence, containing at least 5, 6, 7, 8, 9, 10, or 11 contiguous residues of the ESKYGPPCPPCP hinge sequence (corresponding to residues 212-223 of SEQ ID NO:29), is included.

[1621] 2w) TNF(I97T/A145R)-GGGGSGGGGSGGGGS-Nivolumab Fc

[1622] Provided herein is a TNFR1 antagonist fusion protein, containing the TNFR1-selective antagonist TNF mutein with the mutations I97T/A145R, with reference to the sequence of soluble TNF, set forth in SEQ ID NO:2. The C-terminus of the TNF(I97T/A145R) mutein (SEQ ID NO:702) is fused to a GGGGSGGGGSGGGGS peptide linker, which is fused to the N-terminus of the nivolumab Fc region (corresponding to residues 224-440 of SEQ ID NO:29; see, also, SEQ ID NO:30). The TNF(I97T/A145R)-GGGGSGGGGSGGGGS-Nivolumab Fc fusion protein has the following sequence (SEQ ID NO:763):

VRSSSRTPSDKPVAHVVANPQAEGQLQWLNRRANA
LLANGVELRDNQLVVPSEGLYLIYSQVLFKGQGCP
STHVLLTHTISRIAVSYQTKVNLLSATKSPCQRET
PEGAEAKPWYEPIYLGGVFQLEKGDRLSAEINRPD
YLDFRESGQVYFGIIALGGGGSGGGGSGGGGSAPE
FLGGPSVFLEPPKPKDTLMISRTPEVTCVVVDVSQ
EDPEVQFNWYVDGVEVHNAKTKPREEQFNSTYRVV
SVLTVLHQDWLNGKEYKCKVSNKGLPSSIEKTISK
AKGQPREPQVYTLPPSQEEMTKNQVSLTCLVKGFY
PSDIAVEWESNGQPENNYKTTPPVLDSDGSFELYS
RLTVDKSRWQEGNVESCSVMHEALHNHYTQKSLSL
SLGK

[1623] Alternatively, the GGGGSGGGGSGGGGS linker is replaced by a Gly-Ser linker, such as a (GSGS)ₙ or a (GGGGS)ₙ linker, where n=1, 2, 3, 4, or 5, or any other suitable short peptide linker as described herein or as known in the art.

[1624] 2x) TNF(I97T/A145R)-GGGGSGGGGSGGGGS-ESKYGPPCPPCP-Nivolumab Fc

[1625] Provided herein is a TNFR1 antagonist fusion protein, containing the TNFR1-selective antagonist TNF mutein with the mutations I97T/A145R, with reference to the sequence of soluble TNF, set forth in SEQ ID NO:2. The C-terminus of the TNF(I97T/A145R) mutein (SEQ ID NO:702) is fused to a GGGGSGGGGSGGGGS peptide linker, which is fused to the hinge sequence of nivolumab, containing the sequence ESKYGPPCPPCP (corresponding to residues 212-223 of SEQ ID NO:29), which is fused to the N-terminus of the nivolumab Fc region (corresponding to residues 224-440 of SEQ ID NO:29; see, also, SEQ ID NO:30). The TNF(I97T/A145R)-GGGGSGGGGSGGGGS-ESKYGPPCPPCP-Nivolumab Fc fusion protein has the following sequence (SEQ ID NO:764):

VRSSSRTPSDKPVAHVVANPQAEGQLQWLNRRANA
LLANGVELRDNQLVVPSEGLYLIYSQVLFKGQGCP
STHVLLTHTISRIAVSYQTKVNLLSATKSPCQRET
PEGAEAKPWYEPIYLGGVFQLEKGDRLSAEINRPD
YLDFRESGQVYFGIIALGGGGSGGGGSGGGGSESK
YGPPCPPCPAPEFLGGPSVFLEPPKPKDTLMISRT
PEVTCVVVDVSQEDPEVQFNWYVDGVEVHNAKTKP
REEQFNSTYRVVSVLTVLHQDWLNGKEYKCKVSNK
GLPSSIEKTISKAKGQPREPQVYTLPPSQEEMTKN
QVSLTCLVKGFYPSDIAVEWESNGQPENNYKTTPP
VLDSDGSFFLYSRLTVDKSRWQEGNVFSCSVMHEA
LHNHYTQKSLSLSLGK

[1626] Alternatively, the GGGGSGGGGSGGGGS linker is replaced by a Gly-Ser linker, such as a (GSGS)ₙ or a (GGGGS)ₙ linker, where n=1, 2, 3, 4, or 5, or any other suitable short peptide linker as described herein or as known in the art. Alternatively, or additionally, all or a portion of the nivolumab hinge sequence, containing at least at least 5, 6, 7, 8, 9, 10, or 11 contiguous residues of the ESKYGPPCPPCP hinge sequence (corresponding to residues 212-223 of SEQ ID NO:29), is included.

### Example 6

[1627] Presentation in the context of an antibody presents difficulties in the context of inhibition of a target receptor. A bivalent antibody induces dimerization of a target receptor, which can lead to its activation. In some instances, as discussed in the detailed description, this is desirable, it is undesirable for an inhibitor of TNFR1. As described in the detailed description, even transient activation of TNFR1 can give rise to a cytokine storm and significant toxicity. Thus, a monovalent inhibitor should be used. To achieve this, monovalent constructs are provided herein (see description throughout, and Example 5 above).

[1628] The cytokine network is defined by cascades of cytokines. As described throughout the disclosure herein, tumor necrosis factor a (TNF) is a key cytokine within the network of pro- and anti-inflammatory cytokines. Its role in promoting autoimmune disease is well-documented and discussed throughout the disclosure herein. TNF can trigger its own production as well as the release of interleukin 1 (IL-1), IL-6, IL-8, and other cytokines, which can induce other inflammatory factors. Endotoxins (lipopolysaccharide; LPS) from gram-negative bacteria are potent TNF-a inducers, and can induce sepsis. Viral infection can lead to an immune response that results in a cytokine storm of inflammatory mediators, triggered by TNF. Physical injury, including chemotherapy and surgery, can result in this outcome.

[1629] As described herein, these negative effects primarily are mediated through TNF/TNFR1 interactions. Opposing these effect are effects of TNF binding to its other receptor, TNFR2. TNFR1 is regarded as the proinflammatory TNF receptor; and TNFR2 is regarded as the anti-inflammatory TNF receptor. As discussed herein, TNFR2 has other pathophysiological functions. For instance, TNFR2 is critical for defense against opportunistic pathogens like tuberculosis and for maintenance of cardio myocyte function.

[1630] Commonly used anti-cytokine drugs are the TNF Blockers, such as, for example adalimumab (Humira®), Etanercept (Enbrel®) and infliximab (Remicade®). These antibodies bind to TNF and prevent its binding to TNFR1 and to TNFR2. The severe toxicities associated with TNF Blockers are well-documented, and, as described herein, many of these toxicities result from inhibition of TNFR2 function. Constructs and products provided herein are designed to inhibit TNFR1 function, but not the function of TNFR2.

[1631] Constructs provided herein, including Vhh-4, exemplified below, and others are derived from Camelid Vhh domains. Vhh-4 is a Vhh anti-TNFR1 domain fused with the N-terminus of human serum albumin. The resulting construct provides the Vhh domain for blocking TNF, but, unlike prior dAbs, has sufficient half-life in vivo for its use as a therapeutic. Results below demonstrate that constructs, such as Vhh-4, are active in inhibiting TNF effects on cells that is at least as potent as the TNF Blockers adalimumab/Humira® and etanercept/Enbrel®.

[1632] This Example exemplifies the activities and properties of an exemplary construct, which is an N-terminal fusion protein of a single chain dAb with human serum albumin.

### A. Construct

[1633] This Example provides an exemplary nanobody and activities thereof.

[1634] Nanobodies, as described in the detailed description, are Vhh domain-containing proteins, include only the heavy chain, and do not require cooperativity from a light chain, as is the case for humans and mice (Harmsen et al. (2007) Appl Microbiol Biotechnol. 77:13-22). Because they are a single chain, they must be presented as fusion proteins, such as grafted-CDRs in an antibody format, because of their short half-life on their own as small proteins (˜13-15 KDa).

[1635] An exemplary construct was prepared. A phage library was prepared using the method described in Sabir et al. ((2014) Comptes Rendus Biologies 337:244-249). Phage with high affinity binding to the tumor necrosis factor receptor-1 (TNFR1) were recovered and tested for their ability to bind TNFR1, and to compete with binding of human tumor necrosis factor-alpha (TNF-a) for TNFR1 as described in U.S. Published Application No. US20140112929.

[1636] Nucleic acid encoding each of the Vhh antibodies, containing a single chain, was expressed in CHO cells (see Sokolowska-Wedzina et al. (2014) Protein Expression and Purification 99:50-57 for description of expression vector), and each was purified by HPLC chromatography. Sample 1 was a control anti-TNFR1 antibody (H398 from ThermoFisher), Vhh1-4 were Vhh antibodies that contain dAbs. The sequences (see SEQ ID NOs: 54, 1478, 58 and 59) are as follows:

Vhh-1:
EVQLLESGGGLVQPGGSLRLSCAASGFTFDKYSMG
WVRQAPGKGLEWVSQISDTADRTYYAHAVKGRFTI
SRDNSKNTLYLQMNSLRAEDTAVYYCAIYTGRWVP
FEYWGQGTLVTVSS
Vhh-2:
EVQLLESGGGLVQPGGSLRLSCAASGFTFSQYRMH
WVRQAPGKSLEWVSSIDTRGSSTYYADPVKGRFTI
SRDNSKNTLYLQMNSLRAEDTAVYYCAKAVTMFSP
FFDYWGQGTLV
Vhh-3:
EVQLLESGGGLVQPGGSLRLSCAASGFTFVDYEMH
WVRQAPGKGLEWVSSISESGTTTYYADSVKGRFTI
SRDNSKNTLYLQMNSLRAEDTAVYYCAKRRFSAST
FDYWGQGTLVTVSS
Vhh-4:
EVQLLESGGGLVQPGGSLRLSCAASGFTFAHETMV
WVRQAPGKGLEWVSHIPPDGQDPFYADSVKGRFTI
SRDNSKNTLYLQMNSLRAEDTAVYHCALLPKRGPW
FDYWGQGTLVTVSS

The highlighted and underlined Cysteines (C) in Vhh-4, and the corresponding cysteines in the other Vhh chains form a loop, whereby the Vhh is a constrained polypeptide. The proline at amino acid residue 14 can be replaced by alanine.

[1637] Expression cassettes encoding the Vhh domain antibody fragments were prepared and expressed, and purified by HPLC chromatography. The Table below shows the expression levels of each test Vhh antibody. Two molecules required a His tag for purification. Results are shown in the following Table:

TABLE 15
Expression and Yield Results for Vhh 1-4

| Item | Description | Tag | Harvest | Yield |
|---|---|---|---|---|
| Sample 1 | Anti-human TNFRSF1A | His | 146 μg | Abt. 1 mg/L |
| | therapeutic antibody | | | |
| | scFv fragment (H398)* | | | |
| Vhh-1 | Recombinant human | None | 500 μg | 30 mg/L |
| | anti-TNFRSF1A | | | |
| | single domain antibody | | | |
| Vhh-2 | Recombinant human | His | 1000 μg | 49.4 mg/L |
| | anti-TNFRSF1A | | | |
| | single domain antibody | | | |
| Vhh-3 | Tandem scFV bispecific | None | 500 μg | 42 mg/L |
| | antibody | | | |
| Vhh-4 | Tandem scFV bispecific | None | 500 μg | 51 mg/L |
| | antibody (see SEQ ID | | | |
| | NO: 1475) | | | |

*TNF receptor superfamily member 1A antibody H398 (ThermoFisher; H398 comprises SEQ ID NO: 678).

[1638] Each of Vhh 1-4 subsequently was tested in binding studies using the surface plasmon resonance (SPR) method (Sciences GL. Biacore Assay Handbook. General Electric Company (2012); and Richter et al. (2019) MAbs 11:166-177). Competition assays of Vhh inhibition of TNF-a binding to TNFR1 extracellular domain also were performed as described in Richter et al. (2019). Inhibition of TNF-induced expression of VCAM or IL8, which are comparable assays, were performed as described by Lin et al., (2015) J Biomed Sci 22: 53; and Sonnier et al. (2010) Journal of Gastrointestinal Surgery 14:1592-1599, respectively.

[1639] A summary of the results is presented in the Table below. The results show that Vhh-4 has a very high affinity for the extracellular domain of TNFR-1 (6.6×10⁻¹³ M); it was 100% competitive for TNF binding to TNFR1 (IC50 ˜1 nM), and was the most efficient of the 4 candidates at inhibiting TNF-induced VCAM-1 synthesis (0.3 nM). Of these Vhh dAb antibodies tested, Vhh-4 performed the best and a construct containing the Vhh-4 and HSA was prepared.

[1640] The sequence below represents the construct (SEQ ID NO:1475) containing Vhh-4: the dAb portion is residues 20-138 of SEQ ID NO:1475, linked via a Gly-Ser linker (residues 139-147 of SEQ ID NO:1475) to human serum albumin (HSA; residues 148-732 of SEQ ID NO:1475).

EVQLLESGGGLVQPGGSLRLSCAASGFTFAHETMV
WVRQAPGKGLEWVSHIPPDGQDPFYADSVKGRFTI
SRDNSKNTLYLQMNSLRAEDTAVYHCALLPKRGPW
FDYWGQGTLVTVSS...HSA....

TABLE 16
Comparative binding and competition assays
(Results with the control antibody not shown*)

| | | TNF | |
|---|---|---|---|
| | Kd | competition | TNF Dependent |
| Sample | (Molar by SPR) | (maximum) | Bioassay (IC50) |
| Vhh-1 | 4.3 × 10⁻¹⁰ | Partial (33%) | IL-8 (500 nM) |
| Vhh-2 | 1.0 × 10⁻⁶ | Non-competitive | VCAM (3 nM) |
| Vhh-3 | 5.7 × 10⁻¹⁴ | Partial (34%) | IL-8 (1 nM) |
| Vhh-4 | 6.6 × 10⁻¹³ | Competitive (100%) | VCAM (0.3 nM) |

*amount of antibody recovered was de minimis

### B. Results

[1641] The exemplary construct containing the Vhh-4 antibody linked to HSA was shown to have activity as a TNFR1 antagonist. It blocked TNFR1 as shown by a significant reduction in IL-6 and IL-8 gene expression in THP1 cells stimulated with LPS. 3×10⁵ THP1 cells were treated with 5 μg and 20 μg, and 0 μg as a control, of the construct for 30 min, followed by LPS (10 ng/ml) stimulation for 4 hours. RNA samples were collected, and qPCR analysis was performed to analyze IL-6 and IL-8 gene expression using the housekeeping gene hypoxanthine-guanine phosphoribosyltransferase (HPRT) as an internal control. The results show that both doses significantly reduced IL-6 and IL-8 expression (n=3, mean±SEM; *p<0.05, **p<0.01, ***p<0.001).

[1642] In other experiments, the effects on inflammatory cytokine expression of Vhh-4 on TNFα stimulated THP-1 cells were compared to the effects of each of etanercept/Enbrel® and adalimumab/Humira®. 3×10⁵ THP1 cells were treated with 20 μg of Vhh-4, etanercept/Enbrel®, or adalimumab/Humira®, followed by TNFα (50 ng/mL) simulation for 7 hours. RNA samples were performed and qPCR analysis was performed to TL-6, IL-8, and TNFα gene expression, using the HPRT, a housekeeping gene product, as an internal control. Results, which are shown in FIG. 6 demonstrate that the Vhh-4 construct is at least as potent as etanercept/Enbrel® and adalimumab/Humira®. In other experiments, this construct had an IC₅₀ of about 9 nM.

### Example 7

[1643] Various additional Vhh domains and fusion proteins were prepared to assess their properties. The results explain the clinical failure of prior art constructs, such as the dAbs (discussed and described in the Detailed Description) that contain a Vhh linked to anti-human serum albumin to bind the Vhh to human serum albumin.

### Materials

[1644] Synthesized Vhh domain proteins had the following sequences. The signal peptide in each construct is residues 1-19, linked for expression to a Vhh domain as follows:

[1645] Signal Peptide for secretion, MEWSWVFLFFLSVTTGVHS SEQ ID NO:1476, is a mouse immunoglobulin heavy-chain leader sequence (Uniprot: A0N1R). Other signal sequences can be used in its place as appropriate for expression in a cell.

### Constructs

206
MEWSWVFLFFLSVTTGVHSEVQLLESGGGLVQPGG
SLRLSCAASGFTFAHETMVWVRQAPGKGLEWVSHI
PPDGQDPFYADSVKGRFTISRDNSKNTLYLQMNSL
RAEDTAVYHCALLPKRGPWFDYWGQGTLVTVSSGG
GGAGGGGHHHHHHHHHH
Residues 20-138 are amino acid
residues 1-119 of SEQ ID NO: 59
MEWSWVFLFFLSVTTGVHSEVQLLESGGGLVQPGG
SLRLSCAASGFTFDKYSMGWVRQAPGKGLEWVSQI
SDTADRTYYAHAVKGRFTISRDNSKNTLYLQMNSL
RAEDTAVYYCAIYTGRWVPFEYWGQGTLVTVSSGG
GGAGGGGHHHHHHHHHH
Residues 20-138 correspond to amino
acid residues 1-119 of SEQ ID NO: 38
208a
MEWSWVFLFFLSVTTGVHSEVQLLESGGGLVQPGG
SLRLSCAASGFTFDKYSMGWVRQAPGKGLEWVSQI
SDTADRTYYAHAVKGRFTISRDNSKNTLYLQMNSL
RAGGGGAGGGGHHHHHHHHHH
Residues 20-107 correspond to amino
acid residues 1-88 of SEQ ID NO: 38
019
MEWSWVFLFFLSVTTGVHSQVQLQESGGGWQPGG
SLTLSCTRTGLTPSTGAVGWYRQAPGKKCELVSYI
TIPSGRTTYTDSVKGRFAISRDKAKNTVFLQMNSL
KPEDTALYYCGDVPYSTIQAMCTDDGPWGQGTQVT
VSSGGGGAGGGGHHHHHHHHHH
Residues in italics are the same as
SEQ ID NO:40 in WO2021/256254 with
one change, a V, which is underlined.

### Methods

[1647] Protein Expression

[1648] His-tagged proteins were expressed using a high expression mammalian vector transfected in suspension CHO cells and purified using Immobilized Metal Affinity Chromatography. Each completed construct was sequence-confirmed before proceeding to DNA scale-up. Suspension CHO cells (TunaCHO™) were seeded in a shake flask and expanded using a serum-free and chemically defined medium. On the day of transfection, the expanded cells were seeded into a new vessel with fresh medium. After transfection, the cells were maintained as a batch-fed culture until the end of the production run. There was no detectable 208a fragment in the medium of the cultured cells transfected with the corresponding construct. The Vhh domain in the 206 construct is the same as the domain in the Vhh-4-human serum albumin construct in Example 6.

[1649] Plasmid DNA Scale-Up

[1650] Each DNA expression construct was scaled up for transfection. Uncut plasmid DNA was analyzed by agarose gel electrophoresis and quality was assessed. Plasmid DNA was sequence-confirmed before proceeding to transfection.

[1651] CHO Transient Transfection (TunaCHO™ Process)

[1652] Suspension CHO cells were seeded in a shake flask and expanded using a serum-free and chemically defined medium. On the day of transfection, the expanded cells were seeded into a new vessel with fresh medium. After transfection, the cells were maintained as a batch-fed culture until the end of the production run.

[1653] IMAC (Immobilized Metal Affinity Chromatography) Purification of His Tagged Protein

[1654] Clarified and buffered conditioned medium from the production run was loaded onto an IMAC column pre-equilibrated with binding buffer. Washing buffer containing 40 mM imidazole was passed through the column until the OD280 value returned to baseline. The target protein was eluted with a linear gradient of increasing imidazole concentration up to 0.5 M. The eluate was collected in fractions, and the OD280 value of each fraction was recorded. Denaturing capillary electrophoresis (CE-SDS, LabChip GXII, Perkin Elmer) of each fraction was performed and analyzed. Fractions containing the target protein were pooled and dialyzed into the client-specified buffer. The protein was filtered through a 0.2 μm membrane filter and the protein concentration was calculated using the OD280 value and the calculated extinction coefficient. Refer to the “Proteins Produced and Aliquots” section for a summary of the protein yield and corresponding information.

[1655] CE-SDS (Capillary Electrophoresis Using Sodium Dodecyl Sulfate) Analysis

CE-SDS analysis of the target protein was performed using a LabChip GXII (Perkin Elmer). Refer to the Certificate of Analysis for results.

[1656] SE-UPLC (Size Exclusion-Ultra High Pressure Liquid Chromatography) Analysis

SE-UPLC analysis of the target protein was performed. SEC standards (MEDNA, Y3101) were chromatographed as a reference for protein sizes. Refer to the Sample Analysis Report for more details and results.

[1657] Protein Purification

[1658] Clarified and buffered conditioned medium from each production run was loaded onto an IMAC column pre-equilibrated with binding buffer. Washing buffer containing 40 mM imidazole was passed through the column until the OD280 value returned to baseline. The target protein was eluted with a linear gradient of increasing imidazole concentration up to 0.5 M. The eluate was collected in fractions, and the OD280 value of each fraction was recorded. Denaturing capillary electrophoresis (CE-SDS, LabChip GXII, Perkin Elmer) of each fraction was performed and analyzed. Fractions containing the target protein were pooled and dialyzed into the client-specified buffer (PBS (137 mM NaCl, 2.7 mM KCl, 10 mMNa2HPO4, 2 mM KH2PO4, pH 7.4). The protein was filtered through a 0.2 μm membrane filter and the protein concentration was calculated using the OD280 value and the calculated extinction coefficient.

The pI of each of the proteins was calculated:
206: theoretical pI of 6.69
541: theoretical pI of 7.22
208a
019: theoretical pI of 7.79
The Vhh-4-HSA fusion protein (SEQ ID NO:1475) has a theoretical pI of 5.75.

[1659] This is of interest because at the pI (isoelectric point) the negative and positive charges in a protein are balanced reducing repulsive electrostatic forces, and the attraction forces predominate, causing aggregation and precipitation (see, e.g., Proteomic Profiling and Analytical Chemistry (Second Edition), 2016). Proteins that have a pI close to the pH of blood (pH 7.4) will aggregate; hence the Vhh domains, which have a pH close to that of blood, will aggregate upon administration. The fusion protein with HSA has much lower pI, and will not aggregate.

### Results

[1660] Vhh Proteins

[1661] Post IMAC purification the proteins were buffer exchanged to 20 mM Histidine 150 mM NaCl pH 6.0 and yield obtained were ˜19 mg of 206, ˜4 mg of 541 and ˜23 mg of 019; however, no target protein was captured and enriched for 208a. No detectable level of 208a in the CM was observed based on CE-SDS analysis.

[1662] Proteins were buffer exchanged to PBS pH 7.4. Post buffer exchange the final yield obtained were 10.76 mg of 206, 1.04 mg of 541, and 20.67 mg of 019. SE-UPLC analysis was performed and 019 was observed to contain >99% monomers. SE-UPLC results 206 and 541 were inconclusive, which might have been caused by column interactions. SE-UPLC analysis was performed and all proteins. The results showed a very significant loss of proteins post buffer exchange for 206 due to aggregation

[1663] Vhh-4 Human Serum Albumin Construct

[1664] The Vhh-4 construct in Example 6, contains the same Vhh domain as 206 above, which has a pI close to that of blood, and which aggregated. The DNA encoding the construct described in Example 6 (Vhh-4 linked to human serum albumin) was cloned into the high expression mammalian vector and the DNA sequences of the gene insert were confirmed. Each DNA construct was scaled up for transfection and the DNA sequence was confirmed after DNA scale-up. A 0.1 liter transient production was completed in CHO cells (TunaCHO™ extended 14-day process). The protein was purified by Anti-Albumin purification and 26.75 mg (1.07 mg/mL) the Vhh-4 fusion protein were obtained. CE-SDS analysis was performed. SE-UPLC analysis was performed and all proteins were observed to contain >97% monomers. No aggregates were observed indicating that fusion Vhh-4-HSA maintains the unaggregated form of Vhh-4.

[1665] These results provide insights into the clinical failure of the prior art constructs that contained the Vhh domains linked to an anti-human serum albumin. As occurred in buffer at pH 7.4, for 206 and the other domains, as described above, exposure to serum, which has a pH of about 7.4, in vivo can induce aggregation, resulting in rapid clearance and very little or no association of a Vhh-4 protein with the targeted free human serum albumin. Constructs provided herein in which the unaggregated form of the Vhh-4 protein is maintained, solve this problem.

[1666] Since modifications will be apparent to those of skill in the art, it is intended that this invention be limited only by the scope of the appended claims.

The application's sequence listing, which the Patent Office published only in electronic form, follows.

SEQUENCE LISTING (1479 sequences)

SEQ ID NO: 1 - protein, 233 aa, Homo sapiens
  TNF alpha (TNF)
MSTESMIRDVELAEEALPKKTGGPQGSRRCLFLSLFSFLIVAGATTLFCLLHFGVIGPQREEFPRDLSLISPLAQAVRSSSRTPSDKPVAHVVANPQAEGQLQWLNRRANALLANGVELRDNQLVVPSEGLYLIYSQVLFKGQGCPSTHVLLTHTISRIAVSYQTKVNLLSAIKSPCQRETPEGAEAKPWYEPIYLGGVFQLEKGDRLSAEINRPDYLDFAESGQVYFGIIAL

SEQ ID NO: 2 - protein, 157 aa, Homo sapiens [sequence omitted]

SEQ ID NO: 3 - protein, 455 aa, Homo sapiens
  TNFR1
MGLSTVPDLLLPLVLLELLVGIYPSGVIGLVPHLGDREKRDSVCPQGKYIHPQNNSICCTKCHKGTYLYNDCPGPGQDTDCRECESGSFTASENHLRHCLSCSKCRKEMGQVEISSCTVDRDTVCGCRKNQYRHYWSENLFQCFNCSLCLNGTVHLSCQEKQNTVCTCHAGFFLRENECVSCSNCKKSLECTKLCLPQIENVKGTEDSGTTVLLPLVIFFGLCLLSLLFIGLMYRYQRWKSKLYSIVCGKSTPEKEGELEGTTTKPLAPNPSFSPTPGFTPTLGFSPVPSSTFTSSSTYTPGDCPNFAAPRREVAPPYQGADPILATALASDPIPNPLQKWEDSAHKPQSLDTDDPATLYAVVENVPPLRWKEFVRRLGLSDHEIDRLELQNGRCLREAQYSMLATWRRRTPRREATLELLGRVLRDMDLLGCLEDIEEALCGPAALPPAPSLLR

SEQ ID NO: 4 - protein, 461 aa, Homo sapiens
  TNFR2
MAPVAVWAALAVGLELWAAAHALPAQVAFTPYAPEPGSTCRLREYYDQTAQMCCSKCSPGQHAKVFCTKTSDTVCDSCEDSTYTQLWNWVPECLSCGSRCSSDQVETQACTREQNRICTCRPGWYCALSKQEGCRLCAPLRKCRPGFGVARPGTETSDVVCKPCAPGTFSNTTSSTDICRPHQICNVVAIPGNASMDAVCTSTSPTRSMAPGAVHLPQPVSTRSQHTQPTPEPSTAPSTSFLLPMGPSPPAEGSTGDFALPVGLIVGVTALGLLIIGVVNCVIMTQVKKKPLCLQREAKVPHLPADKARGTQGPEQQHLLITAPSSSSSSLESSASALDRRAPTRNQPQAPGVEASGAGEARASTGSSDSSPGGHGTQVNVTCIVNVCSSSDHSSQCSSQASSTMGDTDSSPSESPKDEQVPFSKEECAFRSQLETPETLLGSTEEKPLPLGVPDAGMKPS

SEQ ID NO: 5 - protein, 235 aa, Mus musculus
  Mouse TNF alpha (TNF)
MSTESMIRDVELAEEALPQKMGGFQNSRRCLCLSLFSFLLVAGATTLFCLLNFGVIGPQRDEKFPNGLPLISSMAQTLTLRSSSQNSSDKPVAHVVANHQVEEQLEWLSQRANALLANGMDLKDNQLVVPADGLYLVYSQVLFKGQGCPDYVLLTHTVSRFAISYQEKVNLLSAVKSPCPKDTPEGAELKPWYEPIYLGGVFQLEKGDQLSAEVNLPKYLDFAESGQVYFGVIAL

SEQ ID NO: 6 - protein, 156 aa, Mus musculus
  Soluble form of mouse TNF alpha (TNF)
LRSSSQNSSDKPVAHVVANHQVEEQLEWLSQRANALLANGMDLKDNQLVVPADGLYLVYSQVLFKGQGCPDYVLLTHTVSRFAISYQEKVNLLSAVKSPCPKDTPEGAELKPWYEPIYLGGVFQLEKGDQLSAEVNLPKYLDFAESGQVYFGVIAL

SEQ ID NO: 7 - protein, 454 aa, Mus musculus
  Mouse TNFR1
MGLPTVPGLLLSLVLLALLMGIHPSGVTGLVPSLGDREKRDSLCPQGKYVHSKNNSICCTKCHKGTYLVSDCPSPGRDTVCRECEKGTFTASQNYLRQCLSCKTCRKEMSQVEISPCQADKDTVCGCKENQFQRYLSETHFQCVDCSPCFNGTVTIPCKETQNTVCNCHAGFFLRESECVPCSHCKKNEECMKLCLPPPLANVTNPQDSGTAVLLPLVILLGLCLLSFIFISLMCRYPRWRPEVYSIICRDPVPVKEEKAGKPLTPAPSPAFSPTSGFNPTLGFSTPGFSSPVSSTPISPIFGPSNWHFMPPVSEVVPTQGADPLLYESLCSVPAPTSVQKWEDSAHPQRPDNADLAILYAVVDGVPPARWKEFMRFMGLSEHEIERLEMQNGRCLREAQYSMLEAWRRRTPRHEDTLEVVGLVLSKMNLAGCLENILEALRNPAPSSTTRLPR

SEQ ID NO: 8 - protein, 474 aa, Mus musculus
  Mouse TNFR2
MAPAALWVALVFELQLWATGHTVPAQVVLTPYKPEPGYECQISQEYYDRKAQMCCAKCPPGQYVKHFCNKTSDTVCADCEASMYTQVWNQFRTCLSCSSSCTTDQVEIRACTKQQNRVCACEAGRYCALKTHSGSCRQCMRLSKCGPGFGVASSRAPNGNVLCKACAPGTFSDTTSSTDVCRPHRICSILAIPGNASTDAVCAPESPTLSAIPRTLYVSQPEPTRSQPLDQEPGPSQTPSILTSLGSTPIIEQSTKGGISLPIGLIVGVTSLGLLMLGLVNCIILVQRKKKPSCLQRDAKVPHVPDEKSQDAVGLEQQHLLTTAPSSSSSSLESSASAGDRRAPPGGHPQARVMAEAQGFQEARASSRISDSSHGSHGTHVNVTCIVNVCSSSDHSSQCSSQASATVGDPDAKPSASPKDEQVPFSQEECPSQSPCETTETLQSHEKPLPLGVPDMGMKPSQAGWFDQIAVKVA

SEQ ID NO: 9 - protein, 330 aa, Homo sapiens [sequence omitted]

SEQ ID NO: 10 - protein, 217 aa, Homo sapiens
  IgG1 Fc (CH2 and CH3 domains)
APELLGGPSVFLFPPKPKDTLMISRTPEVTCVVVDVSHEDPEVKFNWYVDGVEVHNAKTKPREEQYNSTYRVVSVLTVLHQDWLNGKEYKCKVSNKALPAPIEKTISKAKGQPREPQVYTLPPSRDELTKNQVSLTCLVKGFYPSDIAVEWESNGQPENNYKTTPPVLDSDGSFFLYSKLTVDKSRWQQGNVFSCSVMHEALHNHYTQKSLSLSPGK

SEQ ID NO: 11 - protein, 326 aa, Homo sapiens
  Human IgG2 Heavy chain constant domain
  DOMAIN (1)...(98): CH1
  DOMAIN (99)...(110): hinge region
  DOMAIN (111)...(219): CH2
  DOMAIN (220)...(326): CH3
ASTKGPSVFPLAPCSRSTSESTAALGCLVKDYFPEPVTVSWNSGALTSGVHTFPAVLQSSGLYSLSSVVTVPSSNFGTQTYTCNVDHKPSNTKVDKTVERKCCVECPPCPAPPVAGPSVFLFPPKPKDTLMISRTPEVTCVVVDVSHEDPEVQFNWYVDGVEVHNAKTKPREEQFNSTFRVVSVLTVVHQDWLNGKEYKCKVSNKGLPAPIEKTISKTKGQPREPQVYTLPPSREEMTKNQVSLTCLVKGFYPSDIAVEWESNGQPENNYKTTPPMLDSDGSFFLYSKLTVDKSRWQQGNVFSCSVMHEALHNHYTQKSLSLSPGK

SEQ ID NO: 12 - protein, 216 aa, Homo sapiens
  IgG2 Fc (CH2 and CH3 domains)
APPVAGPSVFLFPPKPKDTLMISRTPEVTCVVVDVSHEDPEVQFNWYVDGVEVHNAKTKPREEQFNSTFRVVSVLTVVHQDWLNGKEYKCKVSNKGLPAPIEKTISKTKGQPREPQVYTLPPSREEMTKNQVSLTCLVKGFYPSDIAVEWESNGQPENNYKTTPPMLDSDGSFFLYSKLTVDKSRWQQGNVFSCSVMHEALHNHYTQKSLSLSPGK

SEQ ID NO: 13 - protein, 377 aa, Homo sapiens
  IgG3 heavy chain constant domain
  DOMAIN (1)...(98): CH1
  DOMAIN (99)...(160): Hinge region
  DOMAIN (161)...(270): CH2
  DOMAIN (271)...(377): CH3
ASTKGPSVFPLAPCSRSTSGGTAALGCLVKDYFPEPVTVSWNSGALTSGVHTFPAVLQSSGLYSLSSVVTVPSSSLGTQTYTCNVNHKPSNTKVDKRVELKTPLGDTTHTCPRCPEPKSCDTPPPCPRCPEPKSCDTPPPCPRCPEPKSCDTPPPCPRCPAPELLGGPSVFLFPPKPKDTLMISRTPEVTCVVVDVSHEDPEVQFKWYVDGVEVHNAKTKPREEQYNSTFRVVSVLTVLHQDWLNGKEYKCKVSNKALPAPIEKTISKTKGQPREPQVYTLPPSREEMTKNQVSLTCLVKGFYPSDIAVEWESSGQPENNYNTTPPMLDSDGSFFLYSKLTVDKSRWQQGNIFSCSVMHEALHNRFTQKSLSLSPGK

SEQ ID NO: 14 - protein, 217 aa, Homo sapiens
  IgG3 Fc (CH2 and CH3 domains)
APELLGGPSVFLFPPKPKDTLMISRTPEVTCVVVDVSHEDPEVQFKWYVDGVEVHNAKTKPREEQYNSTFRVVSVLTVLHQDWLNGKEYKCKVSNKALPAPIEKTISKTKGQPREPQVYTLPPSREEMTKNQVSLTCLVKGFYPSDIAVEWESSGQPENNYNTTPPMLDSDGSFFLYSKLTVDKSRWQQGNIFSCSVMHEALHNRFTQKSLSLSPGK

SEQ ID NO: 15 - protein, 327 aa, Homo sapiens
  IgG4 Heavy chain constant domain
  DOMAIN (1)...(98): CH1
  DOMAIN (99)...(110): Hinge region
  DOMAIN (111)...(220): CH2
  DOMAIN (221)...(327): CH3
ASTKGPSVFPLAPCSRSTSESTAALGCLVKDYFPEPVTVSWNSGALTSGVHTFPAVLQSSGLYSLSSVVTVPSSSLGTKTYTCNVDHKPSNTKVDKRVESKYGPPCPSCPAPEFLGGPSVFLFPPKPKDTLMISRTPEVTCVVVDVSQEDPEVQFNWYVDGVEVHNAKTKPREEQFNSTYRVVSVLTVLHQDWLNGKEYKCKVSNKGLPSSIEKTISKAKGQPREPQVYTLPPSQEEMTKNQVSLTCLVKGFYPSDIAVEWESNGQPENNYKTTPPVLDSDGSFFLYSRLTVDKSRWQEGNVFSCSVMHEALHNHYTQKSLSLSLGK

SEQ ID NO: 16 - protein, 217 aa, Homo sapiens
  IgG4 Fc (CH2 and CH3 domains)
APEFLGGPSVFLFPPKPKDTLMISRTPEVTCVVVDVSQEDPEVQFNWYVDGVEVHNAKTKPREEQFNSTYRVVSVLTVLHQDWLNGKEYKCKVSNKGLPSSIEKTISKAKGQPREPQVYTLPPSQEEMTKNQVSLTCLVKGFYPSDIAVEWESNGQPENNYKTTPPVLDSDGSFFLYSRLTVDKSRWQEGNVFSCSVMHEALHNHYTQKSLSLSLGK

SEQ ID NO: 17 - protein, 107 aa, Homo sapiens [sequence omitted]

SEQ ID NO: 18 - protein, 106 aa, Homo sapiens
  Immunoglobulin lambda constant 1 light chain domain (chain C)
GQPKANPTVTLFPPSSEELQANKATLVCLISDFYPGAVTVAWKADGSPVKAGVETTKPSKQSNNKYAASSYLSLTPEQWKSHRSYSCQVTHEGSTVEKTVAPTECS

SEQ ID NO: 19 - protein, 106 aa, Homo sapiens
  Immunoglobulin lambda  CONSTANT 2 light chain domain (chain C)
GQPKAAPSVTLFPPSSEELQANKATLVCLISDFYPGAVTVAWKADSSPVKAGVETTTPSKQSNNKYAASSYLSLTPEQWKSHRSYSCQVTHEGSTVEKTVAPTECS

SEQ ID NO: 20 - protein, 106 aa, Homo sapiens
  Immunoglobulin lambda CONSTANT 3 light chain domain (chain C)
GQPKAAPSVTLFPPSSEELQANKATLVCLISDFYPGAVTVAWKADSSPVKAGVETTTPSKQSNNKYAASSYLSLTPEQWKSHKSYSCQVTHEGSTVEKTVAPTECS

SEQ ID NO: 21 - protein, 106 aa, Homo sapiens
  Immunoglobulin lambda CONSTANT 6 light chain domain (chain C)
GQPKAAPSVTLFPPSSEELQANKATLVCLISDFYPGAVKVAWKADGSPVNTGVETTTPSKQSNNKYAASSYLSLTPEQWKSHRSYSCQVTHEGSTVEKTVAPAECS

SEQ ID NO: 22 - protein, 106 aa, Homo sapiens
  Immunoglobulin lambda CONSTANT 7 light chain domain (chain C)
GQPKAAPSVTLFPPSSEELQANKATLVCLVSDFNPGAVTVAWKADGSPVKVGVETTKPSKQSNNKYAASSYLSLTPEQWKSHRSYSCRVTHEGSTVEKTVAPAECS

SEQ ID NO: 23 - protein, 214 aa, Artificial Sequence
  Adalimumab Light Chain
DIQMTQSPSSLSASVGDRVTITCRASQGIRNYLAWYQQKPGKAPKLLIYAASTLQSGVPSRFSGSGSGTDFTLTISSLQPEDVATYYCQRYNRAPYTFGQGTKVEIKRTVAAPSVFIFPPSDEQLKSGTASVVCLLNNFYPREAKVQWKVDNALQSGNSQESVTEQDSKDSTYSLSSTLTLSKADYEKHKVYACEVTHQGLSSPVTKSFNRGEC

SEQ ID NO: 24 - protein, 451 aa, Artificial Sequence
  Adalimumab Heavy Chain
EVQLVESGGGLVQPGRSLRLSCAASGFTFDDYAMHWVRQAPGKGLEWVSAITWNSGHIDYADSVEGRFTISRDNAKNSLYLQMNSLRAEDTAVYYCAKVSYLSTASSLDYWGQGTLVTVSSASTKGPSVFPLAPSSKSTSGGTAALGCLVKDYFPEPVTVSWNSGALTSGVHTFPAVLQSSGLYSLSSVVTVPSSSLGTQTYICNVNHKPSNTKVDKKVEPKSCDKTHTCPPCPAPELLGGPSVFLFPPKPKDTLMISRTPEVTCVVVDVSHEDPEVKFNWYVDGVEVHNAKTKPREEQYNSTYRVVSVLTVLHQDWLNGKEYKCKVSNKALPAPIEKTISKAKGQPREPQVYTLPPSRDELTKNQVSLTCLVKGFYPSDIAVEWESNGQPENNYKTTPPVLDSDGSFFLYSKLTVDKSRWQQGNVFSCSVMHEALHNHYTQKSLSLSPGK

SEQ ID NO: 25 - protein, 214 aa, Artificial Sequence
  Trastuzumab light chain
DIQMTQSPSSLSASVGDRVTITCRASQDVNTAVAWYQQKPGKAPKLLIYSASFLYSGVPSRFSGSRSGTDFTLTISSLQPEDFATYYCQQHYTTPPTFGQGTKVEIKRTVAAPSVFIFPPSDEQLKSGTASVVCLLNNFYPREAKVQWKVDNALQSGNSQESVTEQDSKDSTYSLSSTLTLSKADYEKHKVYACEVTHQGLSSPVTKSFNRGEC

SEQ ID NO: 26 - protein, 450 aa, Artificial Sequence
  Trastuzumab heavy chain
  DOMAIN (1)...(120): VH
  DOMAIN (121)...(218): CH1
  DOMAIN (219)...(233): hinge region
  DOMAIN (234)...(343): CH2
  DOMAIN (344)...(450): CH3
EVQLVESGGGLVQPGGSLRLSCAASGFNIKDTYIHWVRQAPGKGLEWVARIYPTNGYTRYADSVKGRFTISADTSKNTAYLQMNSLRAEDTAVYYCSRWGGDGFYAMDYWGQGTLVTVSSASTKGPSVFPLAPSSKSTSGGTAALGCLVKDYFPEPVTVSWNSGALTSGVHTFPAVLQSSGLYSLSSVVTVPSSSLGTQTYICNVNHKPSNTKVDKKVEPKSCDKTHTCPPCPAPELLGGPSVFLFPPKPKDTLMISRTPEVTCVVVDVSHEDPEVKFNWYVDGVEVHNAKTKPREEQYNSTYRVVSVLTVLHQDWLNGKEYKCKVSNKALPAPIEKTISKAKGQPREPQVYTLPPSREEMTKNQVSLTCLVKGFYPSDIAVEWESNGQPENNYKTTPPVLDSDGSFFLYSKLTVDKSRWQQGNVFSCSVMHEALHNHYTQKSLSLSPGK

SEQ ID NO: 27 - protein, 217 aa, Artificial Sequence
  Trastuzumab Fc (CH2 and CH3 domains)
APELLGGPSVFLFPPKPKDTLMISRTPEVTCVVVDVSHEDPEVKFNWYVDGVEVHNAKTKPREEQYNSTYRVVSVLTVLHQDWLNGKEYKCKVSNKALPAPIEKTISKAKGQPREPQVYTLPPSREEMTKNQVSLTCLVKGFYPSDIAVEWESNGQPENNYKTTPPVLDSDGSFFLYSKLTVDKSRWQQGNVFSCSVMHEALHNHYTQKSLSLSPGK

SEQ ID NO: 28 - protein, 214 aa, Artificial Sequence
  Nivolumab light chain
EIVLTQSPATLSLSPGERATLSCRASQSVSSYLAWYQQKPGQAPRLLIYDASNRATGIPARFSGSGSGTDFTLTISSLEPEDFAVYYCQQSSNWPRTFGQGTKVEIKRTVAAPSVFIFPPSDEQLKSGTASVVCLLNNFYPREAKVQWKVDNALQSGNSQESVTEQDSKDSTYSLSSTLTLSKADYEKHKVYACEVTHQGLSSPVTKSFNRGEC

SEQ ID NO: 29 - protein, 440 aa, Artificial Sequence
  Nivolumab heavy chain
  DOMAIN (1)...(113): VH
  DOMAIN (114)...(221): CH1
  DOMAIN (212)...(223): Hinge region
  DOMAIN (224)...(333): CH2
  DOMAIN (334)...(440): CH3
QVQLVESGGGVVQPGRSLRLDCKASGITFSNSGMHWVRQAPGKGLEWVAVIWYDGSKRYYADSVKGRFTISRDNSKNTLFLQMNSLRAEDTAVYYCATNDDYWGQGTLVTVSSASTKGPSVFPLAPCSRSTSESTAALGCLVKDYFPEPVTVSWNSGALTSGVHTFPAVLQSSGLYSLSSVVTVPSSSLGTKTYTCNVDHKPSNTKVDKRVESKYGPPCPPCPAPEFLGGPSVFLFPPKPKDTLMISRTPEVTCVVVDVSQEDPEVQFNWYVDGVEVHNAKTKPREEQFNSTYRVVSVLTVLHQDWLNGKEYKCKVSNKGLPSSIEKTISKAKGQPREPQVYTLPPSQEEMTKNQVSLTCLVKGFYPSDIAVEWESNGQPENNYKTTPPVLDSDGSFFLYSRLTVDKSRWQEGNVFSCSVMHEALHNHYTQKSLSLSLGK

SEQ ID NO: 30 - protein, 217 aa, Artificial Sequence; identical to SEQ ID NO: 16
  Nivolumab Fc (CH2 and CH3 domains)

SEQ ID NO: 31 - protein, 444 aa, Artificial Sequence
  ATROSAB heavy chain
  DOMAIN (1)...(115): VH
  DOMAIN (116)...(218): CH1
  DOMAIN (219)...(234): Hinge region
  DOMAIN (235)...(337): CH2
  DOMAIN (338)...(444): CH3
QVQLVQSGAEVKKPGSSVKVSCKASGYTFTDFYINWVRQAPGQGLEWIGEIYPYSGHAYYNEKFKARVTITADKSTSTAYMELSSLRSEDTAVYYCARWDFLDYWGQGTTVTVSSASTKGPSVFPLAPSSKSTSGGTAALGCLVKDYFPEPVTVSWNSGALTSGVHTFPAVLQSSGLYSLSSVVTVPSSSLGTQTYICNVNHKPSNTKVDKKVEPKSCDKTHTCPPCPAPPVAGPSVFLFPPKPKDTLMISRTPEVTCVVVDVSHEDPEVKFNWYVDGVEVHNAKTKPREEQYNSTYRVVSVLTVLHQDWLNGKEYKCKVSNKGLPSSIEKTISKAKGQPREPQVYTLPPSRDELTKNQVSLTCLVKGFYPSDIAVEWESNGQPENNYKTTPPVLDSDGSFFLYSKLTVDKSRWQQGNVFSCSVMHEALHNHYTQKSLSLSPGK

SEQ ID NO: 32 - protein, 219 aa, Artificial Sequence
  ATROSAB light chain
  DOMAIN (1)...(113): VL
  DOMAIN (114)...(219): CL
DIVMTQSPLSLPVTPGEPASISCRSSQSLLHSNGNTYLHWYLQKPGQSPQLLIYTVSNRFSGVPDRFSGSGSGTDFTLKISRVEAEDVGVYYCSQSTHVPYTFGGGTKVEIKRTVAAPSVFIFPPSDEQLKSGTASVVCLLNNFYPREAKVQWKVDNALQSGNSQESVTEQDSKDSTYSLSSTLTLSKADYEKHKVYACEVTHQGLSSPVTKSFNRGEC

SEQ ID NO: 33 - protein, 115 aa, Artificial Sequence
  H398 VH domain
QVQLQESGAELARPGASVKLSCKASGYTFTDFYINWVKQRTGQGLEWIGEIYPYSGHAYYNEKFKAKATLTADKSSSTAFMQLNSLTSEDSAVYFCVRWDFLDYWGQGTTLTVSS

SEQ ID NO: 34 - protein, 113 aa, Artificial Sequence
  H398 VL domain
DIVMTQSPLSLPVSLGDQASISCRSSQSLLHSNGNTYLHWYVQKPGQSPKLLIYTVSNRFSGVPDRFSGSGSGTDFTLKISRVEAEDLGVYFCSQSTHVPYTFGGGTKLEIKR

SEQ ID NO: 35 - protein, 609 aa, Homo sapiens [sequence omitted]

SEQ ID NO: 36 - protein, 365 aa, Homo sapiens
  Human FcRn (IgG receptor FcRn large subunit p51)
  SIGNAL (1)...(23): signal peptide
  DOMAIN (24)...(297): extracellular domain
  DOMAIN (298)...(321): transmembrane domain
  DOMAIN (322)...(365): cytoplasmic domain
MGVPRPQPWALGLLLFLLPGSLGAESHLSLLYHLTAVSSPAPGTPAFWVSGWLGPQQYLSYNSLRGEAEPCGAWVWENQVSWYWEKETTDLRIKEKLFLEAFKALGGKGPYTLQGLLGCELGPDNTSVPTAKFALNGEEFMNFDLKQGTWGGDWPEALAISQRWQQQDKAANKELTFLLFSCPHRLREHLERGRGNLEWKEPPSMRLKARPSSPGFSVLTCSAFSFYPPELQLRFLRNGLAAGTGQGDFGPNSDGSFHASSSLTVKSGDEHHYCCIVQHAGLAQPLRVELESPAKSSVLVVGIVIGVLLLTAAAVGGALLWRRMRSGLPAPWISLRGDDTGVLLPTPGEAQDADLKDVNVIPATA

SEQ ID NO: 37 - DNA, 690 bp, Artificial Sequence
  DMS5541
gaggtgcagctgttggagtctgggggaggcttggtacagcctggggggtccctgcgtctctcctgtgcagcctccggattcacctttgataagtattcgatggggtgggtccgccaggctccagggaagggtctagagtgggtctcacagatttcggatactgctgatcgtacatactacgcacacgcggtgaagggccggttcaccatctcccgcgacaattccaagaacacgctgtatctgcaaatgaacagcctgcgtgctgaggacaccgcggtatattactgtgcgatatatactgggcgttgggtgccttttgagtactggggtcagggaaccctggtcaccgtctcgagcgctagcaccgacatccagatgacccagtctccatcctccctgtctgcatctgtaggagaccgtgtcaccatcacttgccgggcaagtcgtccgattgggacgacgttaagttggtaccagcagaaaccagggaaagcccctaagctcctgatcctgtggaattcccgtttgcaaagtggggtcccatcacgtttcagtggcagtggatctgggacagatttcactctcaccatcagcagtctgcaacctgaagattttgctacgtactactgtgcgcaggctgggacgcatcctacgacgttcggccaagggaccaaggtggaaatcaaacgg

SEQ ID NO: 38 - protein, 230 aa, Artificial Sequence
  DMS5541
EVQLLESGGGLVQPGGSLRLSCAASGFTFDKYSMGWVRQAPGKGLEWVSQISDTADRTYYAHAVKGRFTISRDNSKNTLYLQMNSLRAEDTAVYYCAIYTGRWVPFEYWGQGTLVTVSSASTDIQMTQSPSSLSASVGDRVTITCRASRPIGTTLSWYQQKPGKAPKLLILWNSRLQSGVPSRFSGSGSGTDFTLTISSLQPEDFATYYCAQAGTHPTTFGQGTKVEIKR

SEQ ID NO: 39 - protein, 231 aa, Artificial Sequence
  DMS5540 (mouse specific)
EVQLLESGGGLVQPGGSLRLSCAASGFTFNRYSMGWLRQAPGKGLEWVSRIDSYGRGTYYEDPVKGRFSISRDNSKNTLYLQMNSLRAEDTAVYYCAKISQFGSNAFDYWGQGTQVTVSSASTDIQMTQSPSSLSASVGDRVTITCRASRPIGTMLSWYQQKPGKAPKLLILFGSRLQSGVPSRFSGSGSGTDFTLTISSLQPEDFATYYCAQAGTHPTTFGQGTKVEIKR

SEQ ID NO: 40 - protein, 1210 aa, Homo sapiens [sequence omitted]

SEQ ID NO: 41 - protein, 1186 aa, Homo sapiens
  Mature human EGFR/HER1 (minus the signal peptide)
  DOMAIN (1)...(621): Extracellular domain (ECD)
  DOMAIN (1)...(165): domain I of ECD
  DOMAIN (166)...(313): domain II of ECD
  DOMAIN (314)...(481): domain III of ECD
  DOMAIN (482)...(621): domain IV of ECD
LEEKKVCQGTSNKLTQLGTFEDHFLSLQRMFNNCEVVLGNLEITYVQRNYDLSFLKTIQEVAGYVLIALNTVERIPLENLQIIRGNMYYENSYALAVLSNYDANKTGLKELPMRNLQEILHGAVRFSNNPALCNVESIQWRDIVSSDFLSNMSMDFQNHLGSCQKCDPSCPNGSCWGAGEENCQKLTKIICAQQCSGRCRGKSPSDCCHNQCAAGCTGPRESDCLVCRKFRDEATCKDTCPPLMLYNPTTYQMDVNPEGKYSFGATCVKKCPRNYVVTDHGSCVRACGADSYEMEEDGVRKCKKCEGPCRKVCNGIGIGEFKDSLSINATNIKHFKNCTSISGDLHILPVAFRGDSFTHTPPLDPQELDILKTVKEITGFLLIQAWPENRTDLHAFENLEIIRGRTKQHGQFSLAVVSLNITSLGLRSLKEISDGDVIISGNKNLCYANTINWKKLFGTSGQKTKIISNRGENSCKATGQVCHALCSPEGCWGPEPRDCVSCRNVSRGRECVDKCNLLEGEPREFVENSECIQCHPECLPQAMNITCTGRGPDNCIQCAHYIDGPHCVKTCPAGVMGENNTLVWKYADAGHVCHLCHPNCTYGCTGPGLEGCPTNGPKIPSIATGMVGALLLLLVVALGIGLFMRRRHIVRKRTLRRLLQERELVEPLTPSGEAPNQALLRILKETEFKKIKVLGSGAFGTVYKGLWIPEGEKVKIPVAIKELREATSPKANKEILDEAYVMASVDNPHVCRLLGICLTSTVQLITQLMPFGCLLDYVREHKDNIGSQYLLNWCVQIAKGMNYLEDRRLVHRDLAARNVLVKTPQHVKITDFGLAKLLGAEEKEYHAEGGKVPIKWMALESILHRIYTHQSDVWSYGVTVWELMTFGSKPYDGIPASEISSILEKGERLPQPPICTIDVYMIMVKCWMIDADSRPKFRELIIEFSKMARDPQRYLVIQGDERMHLPSPTDSNFYRALMDEEDMDDVVDADEYLIPQQGFFSSPSTSRTPLLSSLSATSNNSTVACIDRNGLQSCPIKEDSFLQRYSSDPTGALTEDSIDDTFLPVPEYINQSVPKRPAGSVQNPVYHNQPLNPAPSRDPHYQDPHSTAVGNPEYLNTVQPTCVNSTFDSPAHWAQKGSHQISLDNPDYQQDFFPKEAKPNGIFKGSTAENAEYLRVAPQSSEFIGA

SEQ ID NO: 42 - protein, 1255 aa, Homo sapiens [sequence omitted]

SEQ ID NO: 43 - protein, 1233 aa, Homo sapiens
  Mature human HER2 (ErbB2) Protein (minus the signal peptide)
  DOMAIN (1)...(628): Extracellular domain (ECD)
  DOMAIN (1)...(172): domain I of ECD
  DOMAIN (173)...(319): domain II of ECD
  DOMAIN (320)...(488): domain III of ECD
  DOMAIN (489)...(628): domain IV of ECD
TQVCTGTDMKLRLPASPETHLDMLRHLYQGCQVVQGNLELTYLPTNASLSFLQDIQEVQGYVLIAHNQVRQVPLQRLRIVRGTQLFEDNYALAVLDNGDPLNNTTPVTGASPGGLRELQLRSLTEILKGGVLIQRNPQLCYQDTILWKDIFHKNNQLALTLIDTNRSRACHPCSPMCKGSRCWGESSEDCQSLTRTVCAGGCARCKGPLPTDCCHEQCAAGCTGPKHSDCLACLHFNHSGICELHCPALVTYNTDTFESMPNPEGRYTFGASCVTACPYNYLSTDVGSCTLVCPLHNQEVTAEDGTQRCEKCSKPCARVCYGLGMEHLREVRAVTSANIQEFAGCKKIFGSLAFLPESFDGDPASNTAPLQPEQLQVFETLEEITGYLYISAWPDSLPDLSVFQNLQVIRGRILHNGAYSLTLQGLGISWLGLRSLRELGSGLALIHHNTHLCFVHTVPWDQLFRNPHQALLHTANRPEDECVGEGLACHQLCARGHCWGPGPTQCVNCSQFLRGQECVEECRVLQGLPREYVNARHCLPCHPECQPQNGSVTCFGPEADQCVACAHYKDPPFCVARCPSGVKPDLSYMPIWKFPDEEGACQPCPINCTHSCVDLDDKGCPAEQRASPLTSIISAVVGILLVVVLGVVFGILIKRRQQKIRKYTMRRLLQETELVEPLTPSGAMPNQAQMRILKETELRKVKVLGSGAFGTVYKGIWIPDGENVKIPVAIKVLRENTSPKANKEILDEAYVMAGVGSPYVSRLLGICLTSTVQLVTQLMPYGCLLDHVRENRGRLGSQDLLNWCMQIAKGMSYLEDVRLVHRDLAARNVLVKSPNHVKITDFGLARLLDIDETEYHADGGKVPIKWMALESILRRRFTHQSDVWSYGVTVWELMTFGAKPYDGIPAREIPDLLEKGERLPQPPICTIDVYMIMVKCWMIDSECRPRFRELVSEFSRMARDPQRFVVIQNEDLGPASPLDSTFYRSLLEDDDMGDLVDAEEYLVPQQGFFCPDPAPGAGGMVHHRHRSSSTRSGGGDLTLGLEPSEEEAPRSPLAPSEGAGSDVFDGDLGMGAAKGLQSLPTHDPSPLQRYSEDPTVPLPSETDGYVAPLTCSPQPEYVNQPDVRPQPPSPREGPLPAARPAGATLERPKTLSPGKNGVVKDVFAFGGAVENPEYLTPQGGAAPQPHPPPAFSPAFDNLYYWDQDPPERGAPPSTFKGTPTAENPEYLGLDVPV

SEQ ID NO: 44 - protein, 1342 aa, Homo sapiens
  Human HER3 (ErbB3) precursor
  SIGNAL (1)...(19): signal peptide
  DOMAIN (20)...(643): Extracellular domain (ECD)
  DOMAIN (644)...(664): transmembrane region
  DOMAIN (665)...(1342): cytoplasmic domain
  DOMAIN (709)...(966): protein kinase
MRANDALQVLGLLFSLARGSEVGNSQAVCPGTLNGLSVTGDAENQYQTLYKLYERCEVVMGNLEIVLTGHNADLSFLQWIREVTGYVLVAMNEFSTLPLPNLRVVRGTQVYDGKFAIFVMLNYNTNSSHALRQLRLTQLTEILSGGVYIEKNDKLCHMDTIDWRDIVRDRDAEIVVKDNGRSCPPCHEVCKGRCWGPGSEDCQTLTKTICAPQCNGHCFGPNPNQCCHDECAGGCSGPQDTDCFACRHFNDSGACVPRCPQPLVYNKLTFQLEPNPHTKYQYGGVCVASCPHNFVVDQTSCVRACPPDKMEVDKNGLKMCEPCGGLCPKACEGTGSGSRFQTVDSSNIDGFVNCTKILGNLDFLITGLNGDPWHKIPALDPEKLNVFRTVREITGYLNIQSWPPHMHNFSVFSNLTTIGGRSLYNRGFSLLIMKNLNVTSLGFRSLKEISAGRIYISANRQLCYHHSLNWTKVLRGPTEERLDIKHNRPRRDCVAEGKVCDPLCSSGGCWGPGPGQCLSCRNYSRGGVCVTHCNFLNGEPREFAHEAECFSCHPECQPMEGTATCNGSGSDTCAQCAHFRDGPHCVSSCPHGVLGAKGPIYKYPDVQNECRPCHENCTQGCKGPELQDCLGQTLVLIGKTHLTMALTVIAGLVVIFMMLGGTFLYWRGRRIQNKRAMRRYLERGESIEPLDPSEKANKVLARIFKETELRKLKVLGSGVFGTVHKGVWIPEGESIKIPVCIKVIEDKSGRQSFQAVTDHMLAIGSLDHAHIVRLLGLCPGSSLQLVTQYLPLGSLLDHVRQHRGALGPQLLLNWGVQIAKGMYYLEEHGMVHRNLAARNVLLKSPSQVQVADFGVADLLPPDDKQLLYSEAKTPIKWMALESIHFGKYTHQSDVWSYGVTVWELMTFGAEPYAGLRLAEVPDLLEKGERLAQPQICTIDVYMVMVKCWMIDENIRPTFKELANEFTRMARDPPRYLVIKRESGPGIAPGPEPHGLTNKKLEEVELEPELDLDLDLEAEEDNLATTTLGSALSLPVGTLNRPRGSQSLLSPSSGYMPMNQGNLGESCQESAVSGSSERCPRPVSLHPMPRGCLASESSEGHVTGSEAELQEKVSMCRSRSRSRSPRPRGDSAYHSQRHSLLTPVTPLSPPGLEEEDVNGYVMPDTHLKGTPSSREGTLSSVGLSSVLGTEEEDEDEEYEYMNRRRRHSPPHPPRPSSLEELGYEYMDVGSDLSASLGSTQSCPLHPVPIMPTAGTTPDEDYEYMNRQRDGGGPGGDYAAMGACPASEQGYEEMRAFQGPGHQAPHVHYARLKTLRSLEATDSAFDNPDYWHSRLFPKANAQRT

SEQ ID NO: 45 - protein, 1323 aa, Homo sapiens
  Mature human HER3 (ErbB3) protein (minus the signal peptide)
  DOMAIN (1)...(621): Extracellular domain (ECD)
  DOMAIN (1)...(166): domain I of ECD
  DOMAIN (167)...(311): domain II of ECD
  DOMAIN (312)...(480): domain III of ECD
  DOMAIN (481)...(621): domain IV of ECD
SEVGNSQAVCPGTLNGLSVTGDAENQYQTLYKLYERCEVVMGNLEIVLTGHNADLSFLQWIREVTGYVLVAMNEFSTLPLPNLRVVRGTQVYDGKFAIFVMLNYNTNSSHALRQLRLTQLTEILSGGVYIEKNDKLCHMDTIDWRDIVRDRDAEIVVKDNGRSCPPCHEVCKGRCWGPGSEDCQTLTKTICAPQCNGHCFGPNPNQCCHDECAGGCSGPQDTDCFACRHFNDSGACVPRCPQPLVYNKLTFQLEPNPHTKYQYGGVCVASCPHNFVVDQTSCVRACPPDKMEVDKNGLKMCEPCGGLCPKACEGTGSGSRFQTVDSSNIDGFVNCTKILGNLDFLITGLNGDPWHKIPALDPEKLNVFRTVREITGYLNIQSWPPHMHNFSVFSNLTTIGGRSLYNRGFSLLIMKNLNVTSLGFRSLKEISAGRIYISANRQLCYHHSLNWTKVLRGPTEERLDIKHNRPRRDCVAEGKVCDPLCSSGGCWGPGPGQCLSCRNYSRGGVCVTHCNFLNGEPREFAHEAECFSCHPECQPMEGTATCNGSGSDTCAQCAHFRDGPHCVSSCPHGVLGAKGPIYKYPDVQNECRPCHENCTQGCKGPELQDCLGQTLVLIGKTHLTMALTVIAGLVVIFMMLGGTFLYWRGRRIQNKRAMRRYLERGESIEPLDPSEKANKVLARIFKETELRKLKVLGSGVFGTVHKGVWIPEGESIKIPVCIKVIEDKSGRQSFQAVTDHMLAIGSLDHAHIVRLLGLCPGSSLQLVTQYLPLGSLLDHVRQHRGALGPQLLLNWGVQIAKGMYYLEEHGMVHRNLAARNVLLKSPSQVQVADFGVADLLPPDDKQLLYSEAKTPIKWMALESIHFGKYTHQSDVWSYGVTVWELMTFGAEPYAGLRLAEVPDLLEKGERLAQPQICTIDVYMVMVKCWMIDENIRPTFKELANEFTRMARDPPRYLVIKRESGPGIAPGPEPHGLTNKKLEEVELEPELDLDLDLEAEEDNLATTTLGSALSLPVGTLNRPRGSQSLLSPSSGYMPMNQGNLGESCQESAVSGSSERCPRPVSLHPMPRGCLASESSEGHVTGSEAELQEKVSMCRSRSRSRSPRPRGDSAYHSQRHSLLTPVTPLSPPGLEEEDVNGYVMPDTHLKGTPSSREGTLSSVGLSSVLGTEEEDEDEEYEYMNRRRRHSPPHPPRPSSLEELGYEYMDVGSDLSASLGSTQSCPLHPVPIMPTAGTTPDEDYEYMNRQRDGGGPGGDYAAMGACPASEQGYEEMRAFQGPGHQAPHVHYARLKTLRSLEATDSAFDNPDYWHSRLFPKANAQRT

SEQ ID NO: 46 - protein, 1308 aa, Homo sapiens
  Human HER4 (ErbB4) precursor
  SIGNAL (1)...(25): signal peptide
  DOMAIN (26)...(651): extracellular domain (ECD)
  DOMAIN (652)...(675): transmembrane region
  DOMAIN (676)...(1308): cytoplasmic domain
  DOMAIN (718)...(985): protein kinase
MKPATGLWVWVSLLVAAGTVQPSDSQSVCAGTENKLSSLSDLEQQYRALRKYYENCEVVMGNLEITSIEHNRDLSFLRSVREVTGYVLVALNQFRYLPLENLRIIRGTKLYEDRYALAIFLNYRKDGNFGLQELGLKNLTEILNGGVYVDQNKFLCYADTIHWQDIVRNPWPSNLTLVSTNGSSGCGRCHKSCTGRCWGPTENHCQTLTRTVCAEQCDGRCYGPYVSDCCHRECAGGCSGPKDTDCFACMNFNDSGACVTQCPQTFVYNPTTFQLEHNFNAKYTYGAFCVKKCPHNFVVDSSSCVRACPSSKMEVEENGIKMCKPCTDICPKACDGIGTGSLMSAQTVDSSNIDKFINCTKINGNLIFLVTGIHGDPYNAIEAIDPEKLNVFRTVREITGFLNIQSWPPNMTDFSVFSNLVTIGGRVLYSGLSLLILKQQGITSLQFQSLKEISAGNIYITDNSNLCYYHTINWTTLFSTINQRIVIRDNRKAENCTAEGMVCNHLCSSDGCWGPGPDQCLSCRRFSRGRICIESCNLYDGEFREFENGSICVECDPQCEKMEDGLLTCHGPGPDNCTKCSHFKDGPNCVEKCPDGLQGANSFIFKYADPDRECHPCHPNCTQGCNGPTSHDCIYYPWTGHSTLPQHARTPLIAAGVIGGLFILVIVGLTFAVYVRRKSIKKKRALRRFLETELVEPLTPSGTAPNQAQLRILKETELKRVKVLGSGAFGTVYKGIWVPEGETVKIPVAIKILNETTGPKANVEFMDEALIMASMDHPHLVRLLGVCLSPTIQLVTQLMPHGCLLEYVHEHKDNIGSQLLLNWCVQIAKGMMYLEERRLVHRDLAARNVLVKSPNHVKITDFGLARLLEGDEKEYNADGGKMPIKWMALECIHYRKFTHQSDVWSYGVTIWELMTFGGKPYDGIPTREIPDLLEKGERLPQPPICTIDVYMVMVKCWMIDADSRPKFKELAAEFSRMARDPQRYLVIQGDDRMKLPSPNDSKFFQNLLDEEDLEDMMDAEEYLVPQAFNIPPPIYTSRARIDSNRSEIGHSPPPAYTPMSGNQFVYRDGGFAAEQGVSVPYRAPTSTIPEAPVAQGATAEIFDDSCCNGTLRKPVAPHVQEDSSTQRYSADPTVFAPERSPRGELDEEGYMTPMRDKPKQEYLNPVEENPFVSRRKNGDLQALDNPEYHNASNGPPKAEDEYVNEPLYLNTFANTLGKAEYLKNNILSMPEKAKKAFDNPDYWNHSLPPRSTLQHPDYLQEYSTKYFYKQNGRIRPIVAENPEYLSEFSLKPGTVLPPPPYRHRNTVV

SEQ ID NO: 47 - protein, 1283 aa, Homo sapiens
  Mature human HER4 (ErbB4) protein (minus the signal peptide)
  DOMAIN (1)...(625): Extracellular domain (ECD)
  DOMAIN (1)...(163): domain I of ECD
  DOMAIN (164)...(308): domain II of ECD
  DOMAIN (309)...(477): domain III of ECD
  DOMAIN (478)...(625): domain IV of ECD
QSVCAGTENKLSSLSDLEQQYRALRKYYENCEVVMGNLEITSIEHNRDLSFLRSVREVTGYVLVALNQFRYLPLENLRIIRGTKLYEDRYALAIFLNYRKDGNFGLQELGLKNLTEILNGGVYVDQNKFLCYADTIHWQDIVRNPWPSNLTLVSTNGSSGCGRCHKSCTGRCWGPTENHCQTLTRTVCAEQCDGRCYGPYVSDCCHRECAGGCSGPKDTDCFACMNFNDSGACVTQCPQTFVYNPTTFQLEHNFNAKYTYGAFCVKKCPHNFVVDSSSCVRACPSSKMEVEENGIKMCKPCTDICPKACDGIGTGSLMSAQTVDSSNIDKFINCTKINGNLIFLVTGIHGDPYNAIEAIDPEKLNVFRTVREITGFLNIQSWPPNMTDFSVFSNLVTIGGRVLYSGLSLLILKQQGITSLQFQSLKEISAGNIYITDNSNLCYYHTINWTTLFSTINQRIVIRDNRKAENCTAEGMVCNHLCSSDGCWGPGPDQCLSCRRFSRGRICIESCNLYDGEFREFENGSICVECDPQCEKMEDGLLTCHGPGPDNCTKCSHFKDGPNCVEKCPDGLQGANSFIFKYADPDRECHPCHPNCTQGCNGPTSHDCIYYPWTGHSTLPQHARTPLIAAGVIGGLFILVIVGLTFAVYVRRKSIKKKRALRRFLETELVEPLTPSGTAPNQAQLRILKETELKRVKVLGSGAFGTVYKGIWVPEGETVKIPVAIKILNETTGPKANVEFMDEALIMASMDHPHLVRLLGVCLSPTIQLVTQLMPHGCLLEYVHEHKDNIGSQLLLNWCVQIAKGMMYLEERRLVHRDLAARNVLVKSPNHVKITDFGLARLLEGDEKEYNADGGKMPIKWMALECIHYRKFTHQSDVWSYGVTIWELMTFGGKPYDGIPTREIPDLLEKGERLPQPPICTIDVYMVMVKCWMIDADSRPKFKELAAEFSRMARDPQRYLVIQGDDRMKLPSPNDSKFFQNLLDEEDLEDMMDAEEYLVPQAFNIPPPIYTSRARIDSNRSEIGHSPPPAYTPMSGNQFVYRDGGFAAEQGVSVPYRAPTSTIPEAPVAQGATAEIFDDSCCNGTLRKPVAPHVQEDSSTQRYSADPTVFAPERSPRGELDEEGYMTPMRDKPKQEYLNPVEENPFVSRRKNGDLQALDNPEYHNASNGPPKAEDEYVNEPLYLNTFANTLGKAEYLKNNILSMPEKAKKAFDNPDYWNHSLPPRSTLQHPDYLQEYSTKYFYKQNGRIRPIVAENPEYLSEFSLKPGTVLPPPPYRHRNTVV

SEQ ID NO: 48 - protein, 16 aa, Artificial Sequence
  cyclic FcRnBP
QRFCTGHFGGLYPCNG

SEQ ID NO: 49 - protein, 16 aa, Artificial Sequence
  cyclic FcRnBP
QRFCTGHFGGLHPCNG

SEQ ID NO: 50 - protein, 16 aa, Artificial Sequence
  linear FcRnBP
QRFVTGHFGGLYPANG

SEQ ID NO: 51 - protein, 16 aa, Artificial Sequence
  linear FcRnBP
QRFVTGHFGGLHPANG

SEQ ID NO: 52 - protein, 108 aa, Artificial Sequence
  DOM7h-11-3 (albumin-binding dAb)
DIQMTQSPSSLSASVGDRVTITCRASRPIGTTLSWYQQKPGKAPKLLILWNSRLQSGVPSRFSGSGSGTDFTLTISSLQPEDFATYYCAQAGTHPTTFGQGTKVEIKR

SEQ ID NO: 53 - protein, 120 aa, Artificial Sequence
  DOM1m-21-23 (mouse anti-TNFR1 dAb from DMS5540)
EVQLLESGGGLVQPGGSLRLSCAASGFTFNRYSMGWLRQAPGKGLEWVSRIDSYGRGTYYEDPVKGRFSISRDNSKNTLYLQMNSLRAEDTAVYYCAKISQFGSNAFDYWGQGTQVTVSS

SEQ ID NO: 54 - protein, 119 aa, Artificial Sequence
  DOM1h-574-208  (human anti-TNFR1 dAb from DMS5541)
EVQLLESGGGLVQPGGSLRLSCAASGFTFDKYSMGWVRQAPGKGLEWVSQISDTADRTYYAHAVKGRFTISRDNSKNTLYLQMNSLRAEDTAVYYCAIYTGRWVPFEYWGQGTLVTVSS

SEQ ID NO: 55 - protein, 119 aa, Artificial Sequence
  GSK1995057 (anti-TNFR1 antagonistic dAb)
EVQLLESGGGLVQPGGSLRLSCAASGFTFAHETMVWVRQAPGKGLEWVSHIPPDGQDPFYADSVKGRFTISRDNSKNTLYLQMNSLRAEDTAVYHCALLPKRGPWFDYWGQGTLVTVSS

SEQ ID NO: 56 - protein, 120 aa, Artificial Sequence
  GSK2862277 (anti-TNFR1 antagonistic dAb)
EVQLLESGGGLVQPGGSLRLSCAASGFTFAHETMVWVRQAPGKGLEWVSHIPPDGQDPFYADSVKGRFTISRDNSKNTLYLQMNSLRAEDTAVYHCALLPKRGPWFDYWGQGTLVTVSSA

SEQ ID NO: 57 - protein, 119 aa, Artificial Sequence
  DOMlh-574-16 anti-TNFR1 dAb
EVQLLESGGGLVQPGGSLRLSCAASGFTFVKYSMGWVRQAPGKGPEWVSQISNTGDRTYYADSVKGRFTISRDNSKNTLYLQMNSLRAEDTAVYYCAIYTGRWEPFDYWGQGTLVTVSS

SEQ ID NO: 58 - protein, 119 aa, Artificial Sequence
  DOMlh-549 anti-TNFR1 dAb
EVQLLESGGGLVQPGGSLRLSCAASGFTFVDYEMHWVRQAPGKGLEWVSSISESGTTTYYADSVKGRFTISRDNSKNTLYLQMNSLRAEDTAVYYCAKRRFSASTFDYWGQGTLVTVSS

SEQ ID NO: 59 - protein, 119 aa, Artificial Sequence; identical to SEQ ID NO: 55
  DOM1h-131-206 anti-TNFR1 dAb

SEQ ID NO: 60 - protein, 119 aa, Artificial Sequence
  DOM1h-131-511 anti-TNFR1 dAb
EVQLLESGGGLVQPGGSLRLSCAASGFTFAHETMVWVRQAPGKGLEWVSHIPPVGQDPFYADSVKGRFTISRDNSKNTLYLQMNSLRAEDTAVYYCALLPKRGPWFDYWGQGTLVTVSS

SEQ ID NO: 61 - protein, 119 aa, Artificial Sequence
  variant 1-1 of DOM1h-131-511 anti-TNFR1 dAb
EVQLLESGGGMVQPGGSLRLSCAASGFTFAHETMVWVRQAPGKGLEWVSHIPPVGQDPFYADSVKGRFTISRDNSKNTLYLQMNSLRAEDTAVYYCALLPKRGPWFDYWGQGTLVTVSS

SEQ ID NO: 62 - protein, 119 aa, Artificial Sequence
  variant 1-2 of DOM1h-131-511 anti-TNFR1 dAb
EVQLLESGGGLVQPGGSLRLSCAASGFAFAHETMVWVRQAPGKGLEWVSHIPPVGQDPFYADSVKGRFTISRDNSKNTLYLQMNSLRAEDTAVYYCALLPKRGPWFDYWGQGTLVTVSS

SEQ ID NO: 63 - protein, 119 aa, Artificial Sequence
  variant 1-3 of DOM1h-131-511 anti-TNFR1 dAb
EVQLLESGGGLVQPGGSLRLSCAASGFNFAHETMVWVRQAPGKGLEWVSHIPPVGQDPFYADSVKGRFTISRDNSKNTLYLQMNSLRAEDTAVYYCALLPKRGPWFDYWGQGTLVTVSS

SEQ ID NO: 64 - protein, 119 aa, Artificial Sequence
  DOM1h-131-201 anti-TNFR1 dAb
EVQLLESGGGLVQPGGSLRLSCAASGFTFAHETMVWVRQAPGKGLEWVSHIPPVGQDPFYADSVKGRFTISRDDSKNTLYLQMNSLRAEDTAVYYCALLPKRGPWFDYWGQGTLVTVSS

SEQ ID NO: 65 - protein, 119 aa, Artificial Sequence
  variant 1-5 of DOM1h-131-511 anti-TNFR1 dAb
EVQLLESGGGLVQPGGSLRLSCAASGFTFAHETMVWVRQAPGKGLEWVSHIPPVGQDPFYADSVKGRFTISRDNSKNTLYLQMNNLRAEDTAVYYCALLPKRGPWFDYWGQGTLVTVSS

SEQ ID NO: 66 - protein, 119 aa, Artificial Sequence
  variant 1-6 of DOM1h-131-511 anti-TNFR1 dAb
EVQLLESGGGLVQPGGSLRLSCAASGFTFAHETMVWVRQAPGKGLEWVSHIPPAGQDPFYADSVKGRFTISRDNSKSTLYLQMNGLRAEDTAVYYCALLPKRGPWFDYWGQGTLVTVSS

SEQ ID NO: 67 - protein, 119 aa, Artificial Sequence
  variant 1-7 of DOM1h-131-511 anti-TNFR1 dAb
EVQLLESGGGLVKPGGSLRLSCAASGFTFAHETMVWVRQAPGKGLEWVSHIPPAGQDPFYADSVKGRFTISRDNSKNTLYLQMNSLRAEDTAVYYCALLPKRGPWFDYWGQGTLVTVSS

SEQ ID NO: 68 - protein, 119 aa, Artificial Sequence
  DOM1h-131-202 anti-TNFR1 dAb
EVQLLESGGGLVQPGGSLRLSCAASGFTFAHETMVWVRQAPGKGLEWVSHIPPDGQDPFYADSVKGRFTISRDNSKNTLYLQMNSLRAEDTAVYYCALLPKRGPWFDYWGQGTLVTVSS

SEQ ID NO: 69 - protein, 119 aa, Artificial Sequence
  DOM1h-131-203 anti-TNFR1 dAb
EVQLWESGGGLVQPGGSLRLSCAASGFTFAHETMVWVRQAPGKGLEWVSHIPPDGQDPFYADSVKGRFTISRDNSKNTLYLQMNSLRAEDTAVYYCALLPKRGPWIDYWGQGTLVTVSS

SEQ ID NO: 70 - protein, 119 aa, Artificial Sequence
  DOM1h-131-204 anti-TNFR1 dAb
EVQLSESGGGLVQPGGSLRLSCAASGFTFAHETMVWVRQAPGKGLEWVSHIPPDGQDPFYADSVKGRFTISRDNSKNTLYLQMNSLRAEDTAVYYCALLPNRGPWFDYWGQGTLVTVSS

SEQ ID NO: 71 - protein, 119 aa, Artificial Sequence
  DOM1h-131-205 anti-TNFR1 dAb
EVQLLESGGGLVQPGGSLRLSCAASGFTFAHETMVWVRQAPGKGLEWVSHIPPDGQDPFYADSVKGRFTISRDNSKNTLYLQMNSLRAEDTAVYYCALLPKRGPWFDYWGQGTQVTVSS

SEQ ID NO: 72 - protein, 119 aa, Artificial Sequence
  variant 1-12 of DOM1h-131-511 anti-TNFR1 dAb
EVRLLESGGGLVQPGGSLRLSCTASGFTFAHETMVWVRQAPGKGLEWVSHIPPDGQDPFYADSVKSRFTISRDNSKNTLYLQMNSLRAEDTAVYYCALLPKRGPWFDYWGQGTQVTVSS

SEQ ID NO: 73 - protein, 119 aa, Artificial Sequence
  variant 1-13 of DOM1h-131-511 anti-TNFR1 dAb
EVRLLESGGGLVQPEGSLRLSCAASGFTFAHETMVWVRQAPGKGLEWVSHIPPDSQDPFYADSVKGRFTISRDNSKNTLYLQMNSLRAEDTAVYYCGLLPKRGPWFDYRGQGTLVTVSS

SEQ ID NO: 74 - protein, 119 aa, Artificial Sequence
  variant 1-14 of DOM1h-131-511 anti-TNFR1 dAb
EVQLLESGGGLVQPGGSLRLSCAASGFTIAHETMVWVRQAPGKGLEWVSHIPPVGQDPFYADSVKGRFTISRDNSKNTLYLQMNSLRAEDTAVYYCALLPKRGPWFDYRGQGTLVTVSS

SEQ ID NO: 75 - protein, 119 aa, Artificial Sequence
  variant 1-15 of DOM1h-131-511 anti-TNFR1 dAb
EVQLLESGGGLVQPGGSLRLSCAASGFTFAHETMVWVRQAPGKGLEWVSHIPPVGQDPFYADSVKGRFTISRDNSKNTLYLQMNSLRAEDTAVYYCARLPKRGPWFDYWGQGTLVTVSS

SEQ ID NO: 76 - protein, 119 aa, Artificial Sequence
  variant 1-18 of DOM1h-131-511 anti-TNFR1 dAb
EVQLLESGGGLVQPGGSLRLSCAASGFTFAHETMVWVRRAPGKGLEWVSHIPPDGQDPFYADSVKGRFTISRDNSKNTLYLQMNSLRAEDTAVYYCALLPKRGPWFDYWGQGTLVTVSS

SEQ ID NO: 77 - protein, 119 aa, Artificial Sequence
  variant 1-19 of DOM1h-131-511 anti-TNFR1 dAb
EVQLLESGGGLVQPGGSLRLSCAATGFTFAHETMVWVRQAPGRGLEWVSHIPPDGQDPFYADSVKGRFTISRDNSKNTLYLQMNSLRAEDTAVYYCALLPKRGPWFDYWGQGTLVTVSS

SEQ ID NO: 78 - protein, 119 aa, Artificial Sequence
  variant 1-20 of DOM1h-131-511 anti-TNFR1 dAb
EVQLLESGGGLVQPGGSLRLSCAASGFTFAHETMVWVRQAPGRGLEWVSHIPSDGQDPFYADSVKGRFTISRDNSKNTLYLQMNSLRAEDTAVYYCALLPKRGPWFDYWGQGTLVTVSS

SEQ ID NO: 79 - protein, 119 aa, Artificial Sequence
  variant 1-21 of DOM1h-131-511 anti-TNFR1 dAb
EVQLLESGGGLVQPGGSLRLSCAASGFTFAHETMVWVRQAPGKGLEWVSHIPPDGQDPFYADSVKGRFTISRDNSKNTLYLQMNSLRAEDTAVYYCALLPKKGPWFDYWGQGTLVTVSS

SEQ ID NO: 80 - protein, 119 aa, Artificial Sequence
  variant 1-22 of DOM1h-131-511 anti-TNFR1 dAb
EVQLLESGGGLVQPGGSLRLSCAASGFTFARETMVWVRQAPGKGLEWVSHIPPVGQDPFYADSVKGRFTISRDNSKNTLYLQMNSLRAEDTAVYYCALLPKRGPWFDYWGQGTLVTVSS

SEQ ID NO: 81 - protein, 119 aa, Artificial Sequence
  variant 1-23 of DOM1h-131-511 anti-TNFR1 dAb
EVQLLESGGGLVQPGGSLRLSCAASGFTFAQETMVWVRQAPGKGLEWVSHIPPVGQDPFYADSVKGRFTISRDNSKNTLYLQMNSLRAEDTAVYYCARLPKRGPWFDYWGQGTLVTVSS

SEQ ID NO: 82 - protein, 119 aa, Artificial Sequence
  variant 1-24 of DOM1h-131-511 anti-TNFR1 dAb
EVQLLESGGGLVQPGGSLRLSCAASGFTFAHETMVWVRQAPGKGLEWVSHIPPVGQDPFYADSVKGRFTISRDNSKNTLYLQMNSLRAEDTAVYYCALLPKKGPWFDYWGQGTLVTVSS

SEQ ID NO: 83 - protein, 119 aa, Artificial Sequence
  variant 1-25 of DOM1h-131-511 anti-TNFR1 dAb
EVQLLESGGGLVQPGGSLRLSCAASGFTFAHETMVWVRQAPGKGLEWVSHIPPAGQDPFYADSVKGRFTISRDNSKNTLYLQMNSLRAEDTAVYYCARLPKRGPWFDYWGQGTLVTVSS

SEQ ID NO: 84 - DNA, 357 bp, Artificial Sequence
  Codon Optimized Sequence 1 of DOM1h-131-206 anti-TNFR1 dAb
gaggttcaattgttggaatccggtggtggattggttcaacctggtggttctttgagattgtcctgtgctgcttccggttttactttcgctcacgagactatggtttgggttagacaggctccaggtaaaggattggaatgggtttcccacattccaccagatggtcaagatccattctacgctgactccgttaagggaagattcactatctccagagacaactccaagaacactttgtacttgcagatgaactccttgagagctgaggatactgctgtttaccactgtgctttgttgccaaagagaggaccttggtttgattactggggacagggaactttggttactgtttcttcc

SEQ ID NO: 85 - DNA, 366 bp, Artificial Sequence
  Codon Optimized Sequence 2 of DOM1h-131-206 anti-TNFR1 dAb
gagaaaagagaggttcaattgcttgaatctggaggaggtttggtccagccaggagggtcccttcgactaagttgtgctgccagtgggtttacgtttgctcatgaaactatggtatgggtccgacaggcacctggtaaaggtcttgaatgggtttcacatatccctccagacggtcaagacccattttacgctgattccgtgaaaggcagatttacaatttcacgagataattctaaaaacaccttgtacttacaaatgaactcattgagagctgaggacactgcagtttatcactgcgctttactaccaaaacgtggaccttggtttgattattggggccaaggtacgttagtgactgttagttct

SEQ ID NO: 86 - DNA, 357 bp, Artificial Sequence
  Codon Optimized Sequence 3 of DOM1h-131-206 anti-TNFR1 dAb
gaagtgcagcttcttgaaagtggtggagggctagtgcagccagggggatctttaagattatcatgcgctgccagtggatttacttttgctcacgagacgatggtctgggtgagacaagctcctggaaaaggtttagagtgggtttctcacattccacctgatggtcaagatcctttctacgcagattccgtcaaaggaagatttactatctccagagataatagtaaaaacactttgtacctacagatgaactcacttagagccgaagataccgctgtgtaccactgcgccttgttgccaaagagaggtccttggttcgattactggggtcagggtactctggttacagtctcatct

SEQ ID NO: 87 - DNA, 357 bp, Artificial Sequence
  Codon Optimized Sequence 4 of DOM1h-131-206 anti-TNFR1 dAb
gaggttcaactgctggaatctggtggtggtctggtacaaccgggtggttccctgcgtctgagctgtgcagcctctggtttcaccttcgctcatgagaccatggtttgggtacgccaggctccgggtaaaggcctggagtgggtaagccatatccctcctgatggtcaggacccgttctatgctgattccgtcaaaggccgttttaccatttctcgtgacaacagcaaaaacactctgtacctgcaaatgaactccctgcgtgcagaagacacggcggtttatcactgtgcactgctgccaaaacgcggcccttggttcgactactggggccagggtactctggtcactgtatcttct

SEQ ID NO: 88 - protein, 119 aa, Artificial Sequence; identical to SEQ ID NO: 55
  Codon Optimized Sequence 5 of DOM1h-131-206 anti-TNFR1 dAb

SEQ ID NO: 89 - protein, 120 aa, Artificial Sequence
  TAR2h-10 anti-TNFR1 dAb
EVQLLESGGGLVQPGGSLRLSCAASGFTFEWYWMGWVRQAPGKGLEWVSAISGSGGSTYYADSVKGRFTISRDNSKNTLYLQMNSLRAEDTAVYYCAKVKLGGGPNFDYWGQGTLVTVSS

SEQ ID NO: 90 - protein, 122 aa, Artificial Sequence
  TAR2h-12 anti-TNFR1 dAb
EVQLLESGGGLVQPGGSLRLSCAASGFTFVAYNMGWVRQAPGKGLEWVSFIDMYGAKTYYADSVKGRFTISRDNSKNTLYLQMNSLRAEDTAVYYCAKLCLMDCSGDIFDYWGQGTLVTVSS

SEQ ID NO: 91 - protein, 116 aa, Artificial Sequence
  TAR2h-13 anti-TNFR1 dAb
EVQLLESGGGLVQPGGSLRLSCAASGFTFPADEMYWVRQAPGKGLEWVSSIGWPGGATYYADSVKGRFTISRDNSKNTLYLQMNSLRAEDTAVYYCAKYGRNFDYWGQGTLVTVSS

SEQ ID NO: 92 - protein, 122 aa, Artificial Sequence
  TAR2h-14 anti-TNFR1 dAb
EVQLLESGGGLVQPGGSLRLSCAASGFTFDQYDMSWVRQAPGKGLEWVSLIDPSGGHTYYADSVKGRFTISRNNSKNTLYLQMNSLRAEDTAVYYCAKPVFSDWPAVEFDYWGQGTLVTVSS

SEQ ID NO: 93 - protein, 116 aa, Artificial Sequence
  TAR2h-16 anti-TNFR1 dAb
EVQLLESGGGLVQPGGSLRLSCAASGFTFGNYDMQWVRQAPGKGLEWVSSIDGTGGTTYYADSVKGRFTISRDNSKNTLYLQMNSLRAEDTAVYYCAQETNAFDYWGQGTLVTVSS

SEQ ID NO: 94 - protein, 124 aa, Artificial Sequence
  TAR2h-17 anti-TNFR1 dAb
EVQLLESGGGLVQPGGSLRLSCAASGFTFGGYQMGWVRQAPGKGLEWVSFIDFTGAHTYYADSVKGRFTISRDNSKNTLYLQMNSLRAEDTAVYYCAKLSDDLTLPERFPFDYWGQGTLVTVSS

SEQ ID NO: 95 - protein, 123 aa, Artificial Sequence
  TAR2h-18 anti-TNFR1 dAb
EVQLLESGGGLVQPGGSLRLSCAASGFTFADYNMTWVRQAPGKGLEWVSWIDQEGVFTYYADSVKGRFTISRDNSKNTLYLQMNSLRAEDTAVYYCAKDFSAAVMLRTSFDYWGQGTLVTVSS

SEQ ID NO: 96 - protein, 116 aa, Artificial Sequence
  TAR2h-19 anti-TNFR1 dAb
EVQLLESGGGLVQPGGSLRLSCAVSGFTFHDYGMVWVRQAPGKGLEWVSQISIDGRTTYYADSVKGRFTISRDNSKNTLYLQMNSLRAEDTAVYYCAKRIFEFDYWGQGTLVTVSS

SEQ ID NO: 97 - protein, 117 aa, Artificial Sequence
  TAR2h-20 anti-TNFR1 dAb
EVQLLESGGGLVQPGGSLRLSCAASGFTFSAYNMSWVRQAPGKGLEWVSAISPSGNETYYADSVKGRFTISRDNSKNTLYLQMNSLRAEDTAVYYCAKGAGEAFDYWGQGTLVTVSS

SEQ ID NO: 98 - protein, 117 aa, Artificial Sequence
  TAR2h-21 anti-TNFR1 dAb
EVQLLESGGGLVQPGGSLRLSCAASGFTFTEYNMGWVRQAPGKGLEWVSFIGHSGQHTYYADSVKGRFTISRDNSKNTLYLQMNSLRAEDTAVYYCAELNNLMFDYWGQGTLVTVSS

SEQ ID NO: 99 - protein, 121 aa, Artificial Sequence
  TAR2h-22 anti-TNFR1 dAb
EVQLLESGGGLVQPGGSLRLSCAASGFTFGEYNMAWVRQAPGKGQEWVSFISTGGHVTYYADSVKGRFTISRDNSKNTLYLQMNSLRAEDTAVYYCAKFSVRFRSSIFDYWGQGTLVTVSS

SEQ ID NO: 100 - protein, 122 aa, Artificial Sequence
  TAR2h-23 anti-TNFR1 dAb
EVQLLESGGGLVQPGGSLRLSCAASGYTFTEYTMGWVRQAPGKGLEWVSWIAVDGIHTYYADSVKGRFTISRDNSKNTLYLQMNSLRAEDTAVYYCAKLDWTATDFSIFDYWGQGTLVTVSS

SEQ ID NO: 101 - protein, 122 aa, Artificial Sequence
  TAR2h-24 anti-TNFR1 dAb
EVQLLESGGGLVQPGGSLRLSCAASGFTFANYTMLWVRQAPGKGLEWVSVISAEGRTTYYADSVKGRFTISRDNSKNTLYLQMNSLRAEDTAVYYCAKLNMKATNFKDFDYWGQGTLVTVSS

SEQ ID NO: 102 - protein, 122 aa, Artificial Sequence
  TAR2h-25 anti-TNFR1 dAb
EVQLLESGGGLVQPGGSLRLSCAASGFTFSEYAMLWVRQAPGKGLEWVSLIDRTGVITYYADSVKGRFTISRDNSKNTLYLQMNSLRAEDTAVYYCAKRDYQYHLYQDFDYRGQGTLVTVSS

SEQ ID NO: 103 - protein, 122 aa, Artificial Sequence
  TAR2h-26 anti-TNFR1 dAb
EVQLLESGGGLVQPGGSLRLSCAASGFTFATYSMGWVRQAPGKGLEWVSMIDPEGYHTYYADSVKGRFTISRDNSKNTLYLQMNSLRAEDTAVYYCAETNRPLTYKPWFDYWGQGTLVTVSS

SEQ ID NO: 104 - protein, 121 aa, Artificial Sequence
  TAR2h-27 anti-TNFR1 dAb
EVQLLESGGGLVQPGGSLRLSCAASGFTFTDYNMAWVRQAPGKGLEWVSFISQEGHHTYYADSVKGRFTISRDNSKNTLYLQMNSLRAEDTAVYYCAKFSTIATLSLFDYWGQGTLVTVSS

SEQ ID NO: 105 - protein, 122 aa, Artificial Sequence
  TAR2h-29 anti-TNFR1 dAb
EVQLLESGGGLVQPGGSLRLSCAASGFTFATYNMGWVRQAPGKGLEWVSSIAWLGSETYYADSVKGRFTISRDNSKNTLYLQMNSLRAEDTAVYYCAKHCKAECTGDLFDYWGQGTLVTVSS

SEQ ID NO: 106 - protein, 122 aa, Artificial Sequence
  TAR2h-30 anti-TNFR1 dAb
EVQLLESGGGLVQPGGALRLSCAASGFTFGIYSMGWVRQAPGKGLEWVSSISGVGMETYYADSVKGRFTISRDNSENTLYLQMNSLRAEDTAVYYCAKHSYPTRGRHLFDYWGQGTLVTVSS

SEQ ID NO: 107 - protein, 120 aa, Artificial Sequence
  TAR2h-32 anti-TNFR1 dAb
EVQLLESGGGLVQPGGSLRLSCAASGFTFEWYWMGWVRQAPGKGLEWVSAISGSGGSTYYADSVKGRFTISRDNSKNTLYLQMNSLRAEDTAVYYCAKVKLGGGPNFDYRGQGTLVTVSS

SEQ ID NO: 108 - protein, 120 aa, Artificial Sequence
  TAR2h-33 anti-TNFR1 dAb
EVQLLESGGGLVQPGGSLRLSCAASGFTFHRYSMGWVRQAPGKGLEWVSAISSSGGITYYADSVKGRFTISRDNSKNTLYLQMNSLRAEDTAVYYCAKSTQAQGLELDYWGQGTLVTVSS

SEQ ID NO: 109 - protein, 120 aa, Artificial Sequence
  TAR2h-10-1 anti-TNFR1 dAb
EVQLLESGGGLVQPGGSLRLSCAASGFTFEWYWMGWVRQAPGKGLEWVSAISGSGGSTYYADSVKGRFTISRDNSKNTLYLQMNNLRAEDTAVYYCAKVKLGGGPNFDYRGQGTLVTVSS

SEQ ID NO: 110 - protein, 120 aa, Artificial Sequence; identical to SEQ ID NO: 107
  TAR2h-10-2 anti-TNFR1 dAb

SEQ ID NO: 111 - protein, 120 aa, Artificial Sequence
  TAR2h-10-3 anti-TNFR1 dAb
EVQLLESGGGLVQPGGSLRLTCAASGFTFEWYWMGWVRQAPGKGLEWVSAISGSGGSTYYADSVKGRFTISRDNSKNTLYLQMNSLRAEDTAVYYCAKVKLGGGPNFDYWGQGTLVTVSS

SEQ ID NO: 112 - protein, 120 aa, Artificial Sequence
  TAR2h-10-4 anti-TNFR1 dAb
EVQLLESGGGLVQPGGSLRLSCAASGFTFEWYWMGWIRQAPGKGLEWVSAISGSGGSTYYADSVKGRFTISRDNSKNTLYLQMNSLRAEDTAVYYCAKVKLGGGPNFDYWGQGTLVTVSS

SEQ ID NO: 113 - protein, 120 aa, Artificial Sequence; identical to SEQ ID NO: 107
  TAR2h-10-5 anti-TNFR1 dAb

SEQ ID NO: 114 - protein, 120 aa, Artificial Sequence
  TAR2h-10-6 anti-TNFR1 dAb
EVQLLESGGGLVQPGGSLRLSCAASGFTFEWYWMGWVRQAPGKGPEWVSAISGSGGSTYYADSVKGRFTISRDNSKNTLYLQMNSLRAEDTAVYYCAKVKLGGGPNFDYRGQGTLVTVSS

SEQ ID NO: 115 - protein, 120 aa, Artificial Sequence
  TAR2h-10-7 anti-TNFR1 dAb
EVQLLESGGGLVQPGGSLRLSCAASGFTFEWYWMGWVRQAPGKGLEWVSAISGSGGSTYYADSVKGRFTISRDNSKNTLYLQMNSLRAKDTAVYYCAKVKLGGGPNFDYRGQGTLVTVSS

SEQ ID NO: 116 - protein, 120 aa, Artificial Sequence
  TAR2h-10-8 anti-TNFR1 dAb
EVQLLESGGGLVQPGGSLRLSCAASGFTFEWYWMGWVRQAPGKGLEWVSAISGSGGSTYYADSVKGRFTISRDNSKNTLYLQMNSLRAGDTAVYYCAKVKLGGGPNFDYRGQGTLVTVSS

SEQ ID NO: 117 - protein, 120 aa, Artificial Sequence
  TAR2h-10-9 anti-TNFR1 dAb
EVQLLESGGGLVQPGGSLRLSCAASGFTFEWYWMGWVRQAPGKGLEWVSAISGSGGRTYYADSVKGRFTISRDNSKNTLYLQMNSLRAEDTAVYYCAKVKLGGGPNFDYWGQGTLVTVSS

SEQ ID NO: 118 - protein, 120 aa, Artificial Sequence
  TAR2h-10-10 anti-TNFR1 dAb
EVQLLESGGGLVQPGGSLRLSCAASGFTFEWYWMGWVRQAPGKGLEWVSAISGSGGSTYYADSVKGRFTISRDNSKNTLYLQMNSLRAEDTAVYYCAKVKLGGGPNFDDRGQGTLVTVSS

SEQ ID NO: 119 - protein, 120 aa, Artificial Sequence
  TAR2h-10-11 anti-TNFR1 dAb
EVQLLESGGGLVQPGGSLRLSCAASGFTFEWYWMGWVRQAPGKGLEWVSAISGSGGSKYYADSVKGRFTISRDNSKNTLYLQMNSLRAEDTAVYYCAKVKLGGGPNFDYRGQGTLVTVSS

SEQ ID NO: 120 - protein, 120 aa, Artificial Sequence
  TAR2h-10-12 anti-TNFR1 dAb
EVQLLESGGGLVQPGGSLRLSCAASGFTFGWYWMGWVRQAPGKGLEWASAISGSGGNTYYADSVKGRFTISRDNSKNTLYLQMNSLRAEDTAVYYCAKVKLGGGPNFDYWGQGTLVTVSS

SEQ ID NO: 121 - protein, 120 aa, Artificial Sequence
  TAR2h-10-13 anti-TNFR1 dAb
EVQLLESGGGLVQPGGSLRLSCAASGFTFEWYWMGWVRQAPGKGLGWVSAISGSGGSTYYADSVRGRFTISRDNSKNTLYLQMNSLRAEDTAVYYCAKVKLGGGPNFDYRGQGTLVTVSS

SEQ ID NO: 122 - protein, 120 aa, Artificial Sequence
  TAR2h-10-14 anti-TNFR1 dAb
  VARIANT (20)...(20): Xaa = any amino acid
EVQLLESGGGLVQPGGSLRXSCAASGFTFEWYWMGWVRQAPGKGPEWVSAISGSGGSTYYADSVKGRFTISRDNSKNTLYLQMNSLRAEDTAVYYCAKVKLGGGPNFDYWGQGTLVTVSS

SEQ ID NO: 123 - protein, 120 aa, Artificial Sequence
  TAR2h-10-15 anti-TNFR1 dAb
EVQLLESGGGLVQPGGSLRLSCAASGFTFEWYWMGWVRQAPGKGLEWVSAISGSGGSTYYADSVKGRFTISRDNSKNTLYLQMNSLRAEDTAVYYCAKVKLGGGPNFDYRGRGTLVTVSS

SEQ ID NO: 124 - protein, 120 aa, Artificial Sequence
  TAR2h-10-16 anti-TNFR1 dAb
EVQLLESGGGLVQPGGSLRLSCAASGFTFEWYWMGWIRQAPGKGLEWVSAISGSGGSTYYADSVKGRFTISRDNSKNTLYLQMNSLRAKDTAVYYCAKVKLGGGPNFDYRGQGTLVTVSS

SEQ ID NO: 125 - protein, 120 aa, Artificial Sequence
  TAR2h-10-17 anti-TNFR1 dAb
EVQLLESGGGLVQPGGSLRLSCAASGFTFEWYWMGWIRQAPGKGLGWVSAISGSGGSTYYADSVRGRFTISRDNSKNTLYLQMNSLRAEDTAVYYCAKVKLGGGPNFDYRGQGTLVTVSS

SEQ ID NO: 126 - protein, 120 aa, Artificial Sequence; identical to SEQ ID NO: 120
  TAR2h-10-18 anti-TNFR1 dAb

SEQ ID NO: 127 - protein, 120 aa, Artificial Sequence
  TAR2h-10-19 anti-TNFR1 dAb
EVQLLESGGGLVQPGGSLRLSCAASGFTFEWYWMGWVRQAPGKGLGWVSAISGSGGSTYYADSVRGRFTISRDNSKNTLYLQMNSLRAKDTAVYYCAKVKLGGGPNFDYRGQGTLVTVSS

SEQ ID NO: 128 - protein, 120 aa, Artificial Sequence
  TAR2h-10-20 anti-TNFR1 dAb
EVQLLESGGGLVQPGGSLRLSCAASGFTFGWYWMGWVRQAPGKGLEWASAISGSGGNTYYADSVKGRFTISRDNSKNTLYLQMNSLRAKDTAVYYCAKVKLGGGPNFDYWGQGTLVTVSS

SEQ ID NO: 129 - protein, 120 aa, Artificial Sequence
  TAR2h-10-21 anti-TNFR1 dAb
EVQLLESGGGLVQPGGSLRLSCAASGFTFGWYWMGWVRQAPGKGLEWVSAISGSGGSTYYADSVKGRFTISRDNSKNTLYLQMNSLRAKDTAVYYCAKVKLGGGPNFDYRGQGTLVTVSS

SEQ ID NO: 130 - protein, 120 aa, Artificial Sequence
  TAR2h-10-22 anti-TNFR1 dAb
EVQLLESGGGLVQPGGSLRLSCAASGFTFGWYWMGWVRQAPGKGLGWVSAISGSGGSTYYADSVRGRFTISRDNSKNTLYLQMNSLRAEDTAVYYCAKVKLGGGPNFDYRGQGTLVTVSS

SEQ ID NO: 131 - protein, 120 aa, Artificial Sequence
  TAR2h-10-27 anti-TNFR1 dAb
EVQLLESGGGLVQPGGSLRLSCAASGFTFEWYWMGWVRQAPGKGLEWVSAISGSGGSTYYADSVKGRFTISRDNSKNTLYLQMNSLRAEDAAVYYCAKVKLGGGPNFGYRGQGTLVTVSS

SEQ ID NO: 132 - protein, 120 aa, Artificial Sequence
  TAR2h-10-29 anti-TNFR1 dAb
EVQLLESGGGLVQPGGSLRLSCAASGFDFEWYWMGWVRQAPGKGLEWVSAISGSGGSTYYADSVKGRFTISRDNSKNTLYLQMNSLRAEDAAVYYCAKVKLGGGPNFGYRGQGTLVTVSS

SEQ ID NO: 133 - protein, 120 aa, Artificial Sequence
  TAR2h-10-31 anti-TNFR1 dAb
EVQLLESGGGLVQPGGSLRLSCAASGFTFEWYWMGWVRQAPGKGLEWVSAISGSGGSTYYADSVKGRFTISRDNSKSTLYLQMNSLRAEDAAVYYCAKVKLGGGPNFGYRGQGTLVTVSS

SEQ ID NO: 134 - protein, 120 aa, Artificial Sequence
  TAR2h-10-35 anti-TNFR1 dAb
EVQLLESGGGLVQPGGSLRLSCAASGFDFEWYWMGWVRQAPGKGLEWVSAISGSGGSTYYADSVKGRFTISRDNSKNTLYLQMNSLHAEDAAVYYCAKVKLGGGPNFGYRGQGTLVTVSS

SEQ ID NO: 135 - protein, 120 aa, Artificial Sequence
  TAR2h-10-36 anti-TNFR1 dAb
EVQLLESGGGLVQPGGSLRLSCAVSGLTFEWYWMGWVRQAPGKGLEWVSAISGSGGSTYYADSVKGRFTISRDNSKNTLYLQMNSLRAEDAAVYYCAKVKLGGGPNFGYRGQGTLVTVSS

SEQ ID NO: 136 - protein, 120 aa, Artificial Sequence
  TAR2h-10-37 anti-TNFR1 dAb
EVQLLGSGGGLVQPGGSLRLSCAASGFTFAWYWMGWVRQAPGKGLEWVSAISGSGGSTYYADSVKGRFTISRDNSKNTLYLQMNSLRAEDAAVYYCAKVKLGGGPNFGYRGQGTLVTVSS

SEQ ID NO: 137 - protein, 120 aa, Artificial Sequence
  TAR2h-10-38 anti-TNFR1 dAb
EVQLLESGGGLVQPGGSLRLSCAASGFTFEWYWMGWVRQAPGKGLEWVSAISGSGGSTYYADSVKGRFTISRDNSKNTLYLQMNSLRAKDAAVYYCAKVKLGGGPNFGYRGQGTLVTVSS

SEQ ID NO: 138 - protein, 120 aa, Artificial Sequence
  TAR2h-10-45 anti-TNFR1 dAb
EVQLLESGGGLVQPGGSLRLSCAASGFTFEPYWMGWVRQAPGKGLEWVSAISGSGGSTYYADSVKGRFTISRDNSKNTLYLQMNSLRAEDAAVYYCAKVKLGGGPNFGYRGQGTLVTVSS

SEQ ID NO: 139 - protein, 120 aa, Artificial Sequence
  TAR2h-10-47 anti-TNFR1 dAb
EVQLLESGGGFVQPGGSLRLSCAASGFTFEWYWMSWVRQAPGKGLEWVSAISGSGGSTYYADSVKGRFTISRDNSKNTLYLQMNSLRAEDASVYYCAKVKLGGGPNFGYRGQGTLVTVSS

SEQ ID NO: 140 - protein, 120 aa, Artificial Sequence
  TAR2h-10-48 anti-TNFR1 dAb
EVQLLESGGGLVQPGGSLRLPCAASGFTFEWYWMTWVRQAPGKGLEWVSAISGSGGSTYYADSVKGRFTISRDNSKNTLYLQMNSLRAEDAAVYYCAKVKLGGGPNFGYRGQGTLVTVSS

SEQ ID NO: 141 - protein, 120 aa, Artificial Sequence
  TAR2h-10-57 anti-TNFR1 dAb
EVQLLESGGGLVQPGGSLRLSCAASGLTFEWYWMGWVRQAPGKGLEWVSAISGSGGSTYYADSVKGRFTISRDNSKNTLYLQMNSLRAEDAAVYYCAKVKLGGGPNFGYRGQGTLVTVSS

SEQ ID NO: 142 - protein, 120 aa, Artificial Sequence
  TAR2h-10-56 anti-TNFR1 dAb
EVQLLESGGGLVQPGGSLRLSCAASGLTFEWYWMGWVRQAPGKGLEWVSAVSGSGGSTYYADSVKGRFTISRDNSKNTLYLQMNSLRAEDAAVYYCAKVKLGGGPNFGYRGQGTLVTVSS

SEQ ID NO: 143 - protein, 120 aa, Artificial Sequence
  TAR2h-10-58 anti-TNFR1 dAb
EVQLLESGGGLVQPGGSLRLSCAASGLTFEWYWMGWVRQAPGKGLEWVSAISGSGDSTYYADSVKGRFTISRDNSKNTLYLQMNSLRAEDAAVYYCAKVKLGGGPNFGYRGQGTLVTVSS

SEQ ID NO: 144 - protein, 120 aa, Artificial Sequence
  TAR2h-10-66 anti-TNFR1 dAb
EVQLLESGGGLVQPGGSLRLSCAASGFTFEWYWMGWVRQAPGKGLEWVSAMSGSGGSTYYADSVKGRFTISRDNSKNTLYLQMNSLRAEDAAVYYCAKVKLGGGPNFGNRGLGTLVTVSS

SEQ ID NO: 145 - protein, 120 aa, Artificial Sequence
  TAR2h-10-64 anti-TNFR1 dAb
EVQLLESGGGSVQPGGSLRLSCAASGFTFDWYWMGWVRQAPGKGLEWASAISGSGGSTYYADSVKDRFTISRDNSKNTLYLQMNSLRAEDAAVYYCAKVKLGGGPDFGYRGQGTLVTVSS

SEQ ID NO: 146 - protein, 120 aa, Artificial Sequence
  TAR2h-10-65 anti-TNFR1 dAb
EVQLLESGGGLVQPGGSLRLSCAASGFTFEWYWMGWVRQAPGKGLEWVSAISGSGGSTYYADSVKGRFTISRDNSKNTLYLQMNSLRAEDGAVYYCAKVKLGGELNFGYRGQGTLVTVSS

SEQ ID NO: 147 - protein, 120 aa, Artificial Sequence
  TAR2h-10-68 anti-TNFR1 dAb
EVQLLESGGGLVQPGGSLRLSCAASGFTFEWYWMGWVRQAPGKGLEWVSAISGSGGSTYYADSVKGRFTISRDNSKNTLYLQMNSLRAEDAAVYYCAKVKLGGGPNFGNRGQGTPVTVSS

SEQ ID NO: 148 - protein, 120 aa, Artificial Sequence
  TAR2h-10-69 anti-TNFR1 dAb
EVQLLESGGGLVQPGGSLRLSCAASGFTFEWYWMGWVRQAPGKGLEWVSAISGSGGSTYYADSVKGRFTISRDNSKNTLYLQMNSLRPEDAAVYYCAKVKLGGGPNFGPRGQGTLVTVSS

SEQ ID NO: 149 - protein, 120 aa, Artificial Sequence
  TAR2h-10-67 anti-TNFR1 dAb
EVQLLESGGGLVQPGGSLRLSCAASGFTFEWYWMGWVRQAPGKGLEWVSAISGSGGSTYYADSVKGRFTISRDNSKNTLYLQMNSLRAEDAAVYYCAKVKLGGGPNFGNRGQGTLVTVSS

SEQ ID NO: 150 - protein, 120 aa, Artificial Sequence
  TAR2h-10-61 anti-TNFR1 dAb
EVQLLESGGGLVQPGGSLRLSCAASGFTIEWYWMGWVRQAPGKGLEWVSAISGSGGSTYYADSVKGRFTISRDNSKNTLYLQMNSLRAEDAAVYYCAKVKLGGGPNFGYRGQGTLVTVSS

SEQ ID NO: 151 - protein, 120 aa, Artificial Sequence
  TAR2h-10-62 anti-TNFR1 dAb
EVQLLESGGGLVQPGGSLRLSCAASGFTFEWYWMGWVRQAPGKGLEWVSAISGSGGSTFYADSVKGRFTISRDNSKNTLYLQMNSLRAEDAAVYYCAKVKLGGGPNFGYRGQGTLVTVSS

SEQ ID NO: 152 - protein, 120 aa, Artificial Sequence
  TAR2h-10-63 anti-TNFR1 dAb
EVQLLESGGGLVQPGGSLRLSCAASGFTFEWYWMGWVRQAPGKGLEWVTAISGSGGSTFYADSVKGRFTISRDNSKNTLYLQMNSLRAEDAAVYYCAKVKLGGGPNFGYRGQGTLVTVSS

SEQ ID NO: 153 - protein, 120 aa, Artificial Sequence
  TAR2h-10-60 anti-TNFR1 dAb
EVQLLESGGGLVQPGGSLRLSCAASGFSFEWYWMGWVRQAPGKGLEWVSAISGSGDSTYYADSVKGRFTISRDNSKNTLYLQMNSLRAEDAAVYYCAKVKLGGGPNFGYRGQGTLVTVSS

SEQ ID NO: 154 - protein, 120 aa, Artificial Sequence
  TAR2h-10-55 anti-TNFR1 dAb
EVQLLESGGGLVQPGGSLRLSCAASGFPFEWYWMGWVRQAPGKGLEWVSAISGSGDSTYYADSVKGRFTISRDNSKNTLYQQMNSLRAEDAAVYYCAKVKLGGGPNFGYRGQGTLVTVSS

SEQ ID NO: 155 - protein, 120 aa, Artificial Sequence
  TAR2h-10-59 anti-TNFR1 dAb
EVQLLESGGGLVQPGGSLRLSCAASGFSFEWYWMGWVRQAPGKGLEWVSAISGSGGSTYYADSVKGRFTISRDNSKNTLYLQMNSLRAEDAAVYYCAKVKLGGGPNFGYRGQGTLVTVSS

SEQ ID NO: 156 - protein, 120 aa, Artificial Sequence
  TAR2h-10-70 anti-TNFR1 dAb
EVQLLESGGGLVQPGGSLRLSCAASGFTFEWYWMGWVRQAPGKGLEWVSAISGSGGSTYYADSVKGRFTISRDNSKNTLYLQMNSLRAEDAAVYYCAKVKLGGGPNYGYRGQGTLVTVSS

SEQ ID NO: 157 - protein, 116 aa, Artificial Sequence
  TAR2h-5 anti-TNFR1 dAb
EVQLLESGGGLVQPGGSLRLSCAASGFTFDLYNMFWVRQAPGKGLEWVSFISQTGRLTWYADSVKGRFTISRDNSKNTLYLQMNSLRAEDTAVYYCAKTLEDFDYWGQGTLVTVSS

SEQ ID NO: 158 - protein, 119 aa, Artificial Sequence
  TAR2h-34 anti-TNFR1 dAb
EVQLLESGGGLVQPGGSLRLSCAASGFTFPEYGMAWVRQAPGKGLEWVSTISHGGEHTYYADSVKGRFTISRDNSKNTLYLQMNSLRAEDTAVYYCAQHPVSHPKFDYWGQGTLVTVSS

SEQ ID NO: 159 - protein, 116 aa, Artificial Sequence
  TAR2h-35 anti-TNFR1 dAb
EVQLLESGGGLVQPGGSLRLSCAASGFTFDAYNMFWVRQAPGKGLEWVSAISPSGRETYYADSVKGRFTISRDNSKNTLYLQMNSLRAEDTAVYYCAKRYPDFDYWGQGTLVTVSS

SEQ ID NO: 160 - protein, 119 aa, Artificial Sequence
  TAR2h-36 anti-TNFR1 dAb
EVQLLESGGGLVQPGGSLRLSCAASGFTFSDYTMGWVRQAPGKGLEWVSLIDRPGNHTYYADSVKGRFTISRDNSKNTLYLQMNSLRAEDTAVYYCAKWGLNVEDFDYWGQGTLVTVSS

SEQ ID NO: 161 - protein, 120 aa, Artificial Sequence
  TAR2h-37 anti-TNFR1 dAb
EVQLLESGGGLVQPGGSLRLSCAASGFTFIEYDMGWVRQAPGKGLEWVSMISSDGRLTYYADSVKGRFTISRDNSKNTLYLQMNSLRAEDTAVYYCAKTWDGLNRNFDYWGQGTLVTVSS

SEQ ID NO: 162 - protein, 119 aa, Artificial Sequence
  TAR2h-38 anti-TNFR1 dAb
EVQLLESGGGLVQPGGSLRLSCAASGFTFIGYNMYWVRQAPGKGLEWVSFISPSGRETYYADSVKGRFTISRDNSKNTLYLQMNSLRAEDTAVYYCAKTLSADGRFDYWGQGTLVTVSS

SEQ ID NO: 163 - protein, 120 aa, Artificial Sequence
  TAR2h-39 anti-TNFR1 dAb
EVQLLESGGGLVQPGGSLRLSCAASGFTFGSYDMGWVRQAPGKGLEWVSFIDVSGTLTYYADSVKGRFTISRDNSKNTLYLQMNSLRAEDTAVYYCAKTVELDGLDFDYWGQGTLVTVSS

SEQ ID NO: 164 - protein, 120 aa, Artificial Sequence
  TAR2h-40 anti-TNFR1 dAb
EVQLLESGGGLVQPGGSLRLSCAASGFTFADYDMGWVRQAPGKGLEWVSFIDSSGSRTYYADSVKGRFTISRDNSKNTLYLQMNSLRAEDTAVYYCAKTAEIVNSRFDYWGQGTLVTVSS

SEQ ID NO: 165 - protein, 120 aa, Artificial Sequence
  TAR2h-41 anti-TNFR1 dAb
EVQLLESGGGLVQPGGSLRLSCAASGFTFDKYQMGWVRQAPGKGLEWVSFIDSNGHHTYYADSVKGRFTISRDNSKNTLYLQMNSLRAEDTAVYYCAELDNLSITPFDYWGQGTLVTVSS

SEQ ID NO: 166 - protein, 120 aa, Artificial Sequence
  TAR2h-42 anti-TNFR1 dAb
EVQLLESGGGLVQPGGSLRLSCAASGFTFAKYNMYWVRQAPGKGLEWVSAISPKGQHTYYADSVKGRFTISRDNSKNTLYLQMNSLRAEDTAVYYCAEGMGSDAITFDYWGQGTLVTVSS

SEQ ID NO: 167 - protein, 122 aa, Artificial Sequence
  TAR2h-43 anti-TNFR1 dAb
EVQLLESGGGLVQPGGSLRLSCAASGFTFSDYTMGWARQAPGKGLEWVSFIDSDGLHTYYADSVKGRFTISRDNSKNTLYLQMNSLRAEDTAVYYCAQNPQYAYESSRFDYWGQGTLVTVSS

SEQ ID NO: 168 - protein, 121 aa, Artificial Sequence
  TAR2h-44 anti-TNFR1 dAb
EVQLLESGGGLVQPGGSLRLSCAASGFTFLQYPMVWVRQAPGKGLEWVSSILAPGGPTYYADSVKGRFTISRDNSKNSLYLQMNSLRAEDTAVYYCAKHPTHTPHPNFDYWGQGTLVTVSS

SEQ ID NO: 169 - protein, 122 aa, Artificial Sequence
  TAR2h-45 anti-TNFR1 dAb
EVQLLESGGGLVQPGGSLRLSCAASGFTFGGYRMAWVRQAPGKGLEWVSFIDSEGVLTYYADSVKGRFTISRDNSKNTLYLQMNSLRAEDTAVYYCAKLCSSNCNMRNFDYWGQGTLVTVSS

SEQ ID NO: 170 - protein, 124 aa, Artificial Sequence
  TAR2h-47 anti-TNFR1 dAb
EVQLLESGGGLVQPGGSLRLSCAASGFTFPVYNMAWVRQAPGKGLEWVSFIAGNGQQTYYADSVKGRFTISRDNSKNTLYLQMNSLRAEDTAVYYCAKFASKVSPMSLTDFDYWGQGTLVTVSS

SEQ ID NO: 171 - protein, 124 aa, Artificial Sequence
  TAR2h-48 anti-TNFR1 dAb
EVQLLESGGGLVQPGGSLRLSCAASGFTFHKYGMAWVRQAPGKGLEWVSFIDLAGLHTYYADSVRGRFTISRDNSKNTLYLQMNSLRAEDTAVYYCAKFATYSSGNEEQPFDYWGQGTLVTVSS

SEQ ID NO: 172 - protein, 123 aa, Artificial Sequence
  TAR2h-50 anti-TNFR1 dAb
EVQLLESGGGLVQPGGSLRLSCAASGFTFSAYNMAWVRQAPGKGLEWVSFIAQSGGHTYYADSVKGRFTISRDNSKNTLYLQMNSLRAEDTAVYYCAKFSHPDEEGTQMFDYWGQGTLVTVSS

SEQ ID NO: 173 - protein, 116 aa, Artificial Sequence
  TAR2h-51 anti-TNFR1 dAb
EVQLLESGGGLVQPGGSLRLSCAASGFTFATYNMSWVRQAPGKGLEWVSAIDAGGMHTYYADSVKGRFTISRDNSKNTLYLQMNSLRAEDTAVYYCAKGTEPFDYWGQGTLVTVSS

SEQ ID NO: 174 - protein, 116 aa, Artificial Sequence
  TAR2h-66 anti-TNFR1 dAb
  VARIANT (33)...(33): Xaa = any amino acid
EVQLLESGGGLVQPGGSLRLSCAASGFTFDEYXMGWVRQAPGKGLEWVSLISPRGSKTYYADSVKGRFTISRDNSKNTLYLQMNSLRAEDTAVYYCAKYKPPFDYWGQGTLVTVSS

SEQ ID NO: 175 - protein, 116 aa, Artificial Sequence
  TAR2h-67 anti-TNFR1 dAb
EVQLLESGGGLVQPGGSLRLSCAASGFTFEDYPMAWVRQAPGKGLEWVSFIGLKGIHTYYADSVKGRFTISRDNSKNTLYLQMNSLRAEDTAVYYCAKDLNNFDYWGQGTLVTVSS

SEQ ID NO: 176 - protein, 119 aa, Artificial Sequence
  TAR2h-68 anti-TNFR1 dAb
EVQLLESGGGLVQPGGSLRLSCAASGFTFGNGNMVWVRQAPGKGLEWVSHIDEYGTNTYYADSVKGRFTISRDNSKNTLYLQMNSLRAEDTAVYYCAKPRNDRPGFDYWGQGTLVTVSS

SEQ ID NO: 177 - protein, 124 aa, Artificial Sequence
  TAR2h-70 anti-TNFR1 dAb
EVQLLESGGGLVQPGGSLRLSCAASGFTFPTEHMYWVRQAPGKGLEWVSGIDTGGSHTYYADSVKGRFTISRDNSKNTLYLQMNSLRAEDTAVYYCAKGLHWSSDSGPVHFDYWGQGTLVTVSS

SEQ ID NO: 178 - protein, 121 aa, Artificial Sequence
  TAR2h-71 anti-TNFR1 dAb
EVQLLESGGGLVQPGGSLRLSCAASGFTFGNVDMHWVRQAPGKGLEWVSAISSAGGETYYADSVKGRFTISRDNSKNTLYLQMNSLRAEDTAVYYCAKRMLANSPLAFDYWGQGTLVTVSS

SEQ ID NO: 179 - protein, 116 aa, Artificial Sequence
  TAR2h-72 anti-TNFR1 dAb
EVQLLESGGGLVQPGGSLRLSCAASGFTFGYEPMAWVRQAPGKGLEWVSTISHTGRDTYYADSVKGRFTISRDNSKNTLYLQMNSLRAEDTAVYYCAKRWSSFDYWGQGTLVTVSS

SEQ ID NO: 180 - protein, 119 aa, Artificial Sequence
  TAR2h-73 anti-TNFR1 dAb
EVQLLESGGGLVQPGGSLRLSCAASGFTFPSEKMAWVRQAPGKGLEWVSSIDERGIMTYYADSVKGRFTISRDNSKNTLYLQMNSLRAEDTAVYYCAKRWTFNTAFDYWGQGTLVTVSS

SEQ ID NO: 181 - protein, 119 aa, Artificial Sequence
  TAR2h-74 anti-TNFR1 dAb
EVQLLESGGGLVQPGGSLRLSCAASGFTFSRENMHWVRQAPGKGLEWVSGIGPRGMPTYYADSVKGRFTISRDNSKNTLYLQMNSLRAEDTAVYYCAKGMNSHDGFDYWGQGTLVTVSS

SEQ ID NO: 182 - protein, 119 aa, Artificial Sequence
  TAR2h-75 anti-TNFR1 dAb
EVQLLESGGGLVQPGGSLRLSCAASGFTFNAYTMIWVRQAPGKGLEWVSYIDPHGTITYYADSVKGRFTISRDNSKNTLYLQMNSLRAEDTAVYYCAKLPRAAPRFDYWGQGTLVTVSS

SEQ ID NO: 183 - protein, 119 aa, Artificial Sequence
  TAR2h-76 anti-TNFR1 dAb
EVQLLESGGGLVQPGGSLRLSCAASGFTFDASEMDWVRQAPGKGLEWVSAISPSGSATYYADSVKGRFTISRDNSKNTLYLQMNSLRAEDTAVYYCAKWTPGRTTFDYWGQGTLVTVSS

SEQ ID NO: 184 - protein, 124 aa, Artificial Sequence; identical to SEQ ID NO: 177
  TAR2h-77 anti-TNFR1 dAb

SEQ ID NO: 185 - protein, 123 aa, Artificial Sequence
  TAR2h-78 anti-TNFR1 dAb
EVQLLESGGGLVQPGGSLRLSCAASGFTFKLYNMAWVRQAPGKGLEWVSFIAAAGPETYYADSVKGRFTISRDNSKNTLYLQMNSLRAEDTAVYYCAKLGDISSIPQHPFDYWGQGTLVTVSS

SEQ ID NO: 186 - protein, 119 aa, Artificial Sequence
  TAR2h-79 anti-TNFR1 dAb
EVQLLESGGGLVQPGGSLRLSCAASGFTFGNVDMHWVRQAPGKGLEWVSAISSAGGETYYADSVKGRFTISRDNSKNTLYLQMNSLRAEDTAVYYCAKSADITKGFDYWGQGTLVTVSS

SEQ ID NO: 187 - protein, 121 aa, Artificial Sequence
  TAR2h-15 anti-TNFR1 dAb
EVRLLESGGGLVQPGGSLRLSCAASGFTFGKYTMTWVRQAPGKGLEWVSHISDDGNSTYYADSVKGRFTISRDNSKNTLYLQMNSLRAEDTAVYYCAKVPILAPRNLFDYWGQGTLVTVSS

SEQ ID NO: 188 - protein, 119 aa, Artificial Sequence
  TAR2h-131-8 anti-TNFR1 dAb
EVQLLESGGGLIQPGGSLRLSCAASGFTFAHETMVWVRQAPGKGLEWVSHIDRVGQDTYYADSVKGRFTISRDNSKNTLYLQMNSLRAEDTAVYYCAKLPKRGPWFDYRGQGTLVTVSS

SEQ ID NO: 189 - protein, 119 aa, Artificial Sequence
  TAR2h-131-24 anti-TNFR1 dAb
EVQLLESGGGLIQPGGSLRLSCAASGFTFAHETMVWVRQAPGKGLEWVSHIDRVGQDTYYADSVKGRFTISRDNSKNTLYLQMNSLRAEDTAVYYCARLPKRGPWFDYRGQGTLVTVSS

SEQ ID NO: 190 - protein, 121 aa, Artificial Sequence
  TAR2h-15-8 anti-TNFR1 dAb
EVRLLESGGGLVQPGGSLRLSCVASGFTFGKSTMTWVRQAPGKGLEWVSHISDDGNSTYYADSVKGRFTISRDNSKNTLYLQMNSLRAEDTAVYYCAKVPILAPRNLFDYWGQGTLVTVSS

SEQ ID NO: 191 - protein, 121 aa, Artificial Sequence
  TAR2h-15-8-1 anti-TNFR1 dAb
EVRLLESGGGLVQPGGSLRLSCVASGFNFGKSTMTWVRQAPGKGLEWVSHISDDGNSTYYADSVKGRFTISRDNSKNTLYLQMNSLRAEDTAVYYCAKVPILAPRNLFDYWGQGTLVTVSS

SEQ ID NO: 192 - protein, 121 aa, Artificial Sequence
  TAR2h-15-8-2 anti-TNFR1 dAb
EVRLLESGGGLVQPGGSLRLSCVASGFTFGKGTMTWVRQAPGKGLEWVSHISDDGNSTYYADSVKGRFTISRDNSKNTLYLQMNSLRAEDTAVYYCAKVPILAPRNLFDYWGQGTLVTVSS

SEQ ID NO: 193 - protein, 122 aa, Artificial Sequence
  TAR2h-185-23 anti-TNFR1 dAb
  VARIANT (62)...(62): Xaa = any amino acid
EVQLLESGGGLVQPGGSLRLSCAASGFTFARYNMGWVRQAPGKGLEWVSLIDPSGGHTYYAXSVKGRSTISRNNSKNTLYLQMNSLRAEDTAVYYCGKPVFSDWPAVEFDYWGQGTLVTVSS

SEQ ID NO: 194 - protein, 119 aa, Artificial Sequence
  TAR2h-154-10-5 anti-TNFR1 dAb
EVQLLESGGGMVQPGGSLRLSCAAPGFTFEHEGMVWVRQAPGKGLEWVSHIGEDGQSTYYADSVKGRFTISRDNSKNTLYLQMNSLRAEDTAVYYCASIPKAGPSFDYWGQGTLVTVSS

SEQ ID NO: 195 - protein, 122 aa, Artificial Sequence
  TAR2h-14-2 anti-TNFR1 dAb
EVQLLESGGGLVQPGGSLRLSCAASGSTFDQYDMSWVRRAPGKGLEWVSLIDPSGGHTYYADSVKGRFTISRNNTKNTLYLQMNSLRAEDTAVYYCAKPVFSDWPAVEFDYWGQGTLVTVSS

SEQ ID NO: 196 - protein, 121 aa, Artificial Sequence
  TAR2h-151-8 anti-TNFR1 dAb
EVQLLESGGGLVQPGGSLRLSCAASGFTFDYGNMFWVRQAPGKGLEWISAISGSGGSTYYADSVKGRFTISRDNSKNTLYLQMNSLRAEDTAVYYCAKDMTTDSPPGFDYWGQGTLVTVSS

SEQ ID NO: 197 - protein, 122 aa, Artificial Sequence
  TAR2h-152-7 anti-TNFR1 dAb
EVQLLESGGGLVQPGGSLRLSCAASGFTFAKETMSWVRQAPGKGLEWVSWISPHGAHTFYADSVKGRFTISRDNSKNTLYLQMNSLRAEDTAVYYCAKPRFSYYPRVSFDYRGQGTLVTVSS

SEQ ID NO: 198 - protein, 116 aa, Artificial Sequence
  TAR2h-35-4 anti-TNFR1 dAb
EVQLLESGGGLVQPGGSLRLSCAASGFTFDAYNMFWFRQAPGKGPEWVSAIGPSGRETYYADSVKGRFTITRDNSKNTLYLQMNSLRAEDTAVYYCAKRYPDFDYWGQGTLVTVSS

SEQ ID NO: 199 - protein, 119 aa, Artificial Sequence
  TAR2h-154-7 anti-TNFR1 dAb
EVQLLESGGGLVQPGGSLRLSCAASGFTFEHEGMVWVRQAPGKGLEWVSHIGEDGQSTYYADSVKGRFTISRDNSRNTLYLQMNSLRAEDTAVYYCANIPKAGPSFDYWGQGTLVTVSS

SEQ ID NO: 200 - protein, 123 aa, Artificial Sequence; identical to SEQ ID NO: 185
  TAR2h-80 anti-TNFR1 dAb

SEQ ID NO: 201 - protein, 119 aa, Artificial Sequence; identical to SEQ ID NO: 181
  TAR2h-81 anti-TNFR1 dAb

SEQ ID NO: 202 - protein, 121 aa, Artificial Sequence
  TAR2h-82 anti-TNFR1 dAb
EVQLLESGGGLVQPGGSLRLSCAASGFTFDASEMDWVRQAPGKGLEWVSAISPSGSATYYADSVKGRFTISRDNSKNTLYLQMNSLRAEDTAVYYCAKRMLANSPLAFDYWGQGTLVTVSS

SEQ ID NO: 203 - protein, 123 aa, Artificial Sequence; identical to SEQ ID NO: 172
  TAR2h-83 anti-TNFR1 dAb

SEQ ID NO: 204 - protein, 120 aa, Artificial Sequence
  TAR2h-84 anti-TNFR1 dAb
EVQLLESGGGLVQPGGSLRLSCAASGFTFADYQMAWVRQAPGKGLEWVSRIDRGGFHTYYADSVKGRFTISRDNSKNTLYLQMNSLRAEDTAVYYCAKPSWHADQYFDYWGQGTLVTVSS

SEQ ID NO: 205 - protein, 120 aa, Artificial Sequence
  TAR2h-85 anti-TNFR1 dAb
EVQLLESGGGLVQPGGSLRLSCAASGFTFKDYNMMWVRQAPGKGLEWVSAIATSGRETYYADSVKGRFTISRDNSKNTLYLQMNSLRAEDTAVYYCAKFTFGGNQDFDYWGQGTLVTVSS

SEQ ID NO: 206 - protein, 120 aa, Artificial Sequence; identical to SEQ ID NO: 166
  TAR2h-86 anti-TNFR1 dAb

SEQ ID NO: 207 - protein, 123 aa, Artificial Sequence; identical to SEQ ID NO: 172
  TAR2h-87 anti-TNFR1 dAb

SEQ ID NO: 208 - protein, 122 aa, Artificial Sequence
  TAR2h-88 anti-TNFR1 dAb
EVQLLESGGGLVQPGGSLRLSCAASGFTFERYDMFWVRQAPGKGLEWVSGISPRGRETYYADSVKGRFTISRDNSKNTLYLQMNSLRAEDTAVYYCAKDMINYHGTPSFDYWGQGTLVTVSS

SEQ ID NO: 209 - protein, 122 aa, Artificial Sequence
  TAR2h-89 anti-TNFR1 dAb
  VARIANT (30)...(30): Xaa= Any Amino Acid
EVQLLESGGGLVQPGGSLRLSCAASGFTFXNYNMVWVRQAPGKGLEWVSWISGAGHSTYYADSVKGRFTISRDNSKNTLYLQMNSLRAEDTAVYYCAKDVDMAGKLNVFDYWGQGTLVTVSS

SEQ ID NO: 210 - protein, 122 aa, Artificial Sequence
  TAR2h-90 anti-TNFR1 dAb
EVQLLESGGGLVQPGGSLRLSCAASGFTFKQYNMYWVRQAPGKGLEWVSFISPSGGETYYADSVKGRFTTSRDNSKNTLYLQMNSLRAEDTAVYYCAKDVDMAGKLNVFDYWGQGTLVTVSS

SEQ ID NO: 211 - protein, 120 aa, Artificial Sequence; identical to SEQ ID NO: 204
  TAR2h-91 anti-TNFR1 dAb

SEQ ID NO: 212 - protein, 120 aa, Artificial Sequence
  TAR2h-92 anti-TNFR1 dAb
EVQLLESGGGLVQPGGSLRLTCAASGFTFDDVNMTWVRQAPGKGLEWVSAIGPSGTETYYADSVKGRFTISRDNSKNTLYLQMNSLRAEDTAVYYCAKHSKTGSAMFDYWGQGTLVTVSS

SEQ ID NO: 213 - protein, 119 aa, Artificial Sequence; identical to SEQ ID NO: 176
  TAR2h-93 anti-TNFR1 dAb

SEQ ID NO: 214 - protein, 119 aa, Artificial Sequence; identical to SEQ ID NO: 181
  TAR2h-94 anti-TNFR1 dAb

SEQ ID NO: 215 - protein, 117 aa, Artificial Sequence
  TAR2h-95 anti-TNFR1 dAb
EVQLLESGGGLVQPGGSLRLSCAASGFTFKGSNMGWVRQAPGKGLEWVSLIDGRGQHTYYADSVKGRFTISRDNSKNTLYLQMNSLRAEDTAVYYCAKPSVREFDYRGQGTLVTVSS

SEQ ID NO: 216 - protein, 121 aa, Artificial Sequence
  TAR2h-96 anti-TNFR1 dAb
EVQLLESGGGLVQPGGSLRLSCAASGFTFSRENMHWVRQAPGKGLEWVSGIGPRGMPTYYADSVKGRFTISRDNSKNTLYLQMNSLRAEDTAVYYCAKRMLANSPLAFDYWGQGTLVTVSS

SEQ ID NO: 217 - protein, 116 aa, Artificial Sequence
  TAR2h-97 anti-TNFR1 dAb
EVQLLESGGGLVQPGGSLRLSCTASGFTFSESTMNWVRQAPGKGLEWVSVITAQGGDTYYADSVKGRFTISRDNSKNTLYLQMNSLRAEDTAVYYCAKPDVLFDYWGQGTLVTVSS

SEQ ID NO: 218 - protein, 117 aa, Artificial Sequence
  TAR2h-99 anti-TNFR1 dAb
EVQLLESGGGLVQPGGSLRLSCAASGFTFEEYNMLWVRQAPGKGLEWVSGIGPSGRETYYADSVKGRFTISRDNSKNTLYLQMNSLRAEDTAVYYCAKGSITLFDYWGQGTLVTVSS

SEQ ID NO: 219 - protein, 124 aa, Artificial Sequence
  TAR2h-100 anti-TNFR1 dAb
EVQLLESGGGLVQPGGSLRLSCAASGFTFSGYNMYWVRQAPGKGLEWVSAIDAYGTHTYYADSVKGRFTISRDNSKNTLYLQMNSLRAEDTAVYYCAEGLQTSDHGERISFDYWGQGTLVTVSS

SEQ ID NO: 220 - protein, 122 aa, Artificial Sequence; identical to SEQ ID NO: 92
  TAR2h-101 anti-TNFR1 dAb

SEQ ID NO: 221 - protein, 122 aa, Artificial Sequence; identical to SEQ ID NO: 92
  TAR2h-102 anti-TNFR1 dAb

SEQ ID NO: 222 - protein, 120 aa, Artificial Sequence
  TAR2h-103 anti-TNFR1 dAb
EVQLLESGGGLVQPGGSLRLSCAASGFTFTRYSMGWVRQAPGKGLEWVSMIDVPGLHTYYADSVKGRFTISRDNSKNTLYLQMNSLRAEDTAVYYCAKISQFGSNAFDYWGQGTLVTVSS

SEQ ID NO: 223 - protein, 120 aa, Artificial Sequence
  TAR2h-104 anti-TNFR1 dAb
  VARIANT (62)...(62): Xaa= Any Amino Acid
  VARIANT (104)...(104): Xaa= Any Amino Acid
EVQLLESGGGLVQPGGSLRLSCAASGFTFEWYWMGWVRQAPGKGLEWVSAISGSGGSTYYAXSVKGRFTISRDNSKNTLYLQMNSLRAEDAAVYYCAKVKLGGXPNFGYRGQGTLVTVSS

SEQ ID NO: 224 - protein, 120 aa, Artificial Sequence
  TAR2h-105 anti-TNFR1 dAb
EVQLLESGGGLVQPGGSLRLSCAASGFTFTRYSMGWVRQAPGKGLEWVSFIDPPSVHTYYADSVKGRFTISRDNSKNTLYLQMNSLRAEDTAVYYCAKISQFGSNAFDYWGQGTLVTVSS

SEQ ID NO: 225 - protein, 120 aa, Artificial Sequence
  TAR2h-106 anti-TNFR1 dAb
  VARIANT (62)...(62): Xaa= Any Amino Acid
EVQLLESGGGLVQPGGSLRLSCAASGFTFTRYSMGWVRQAPGKGLEWVSMIDVGGSHTYYAXSVKGRFTISRDNSKNTLYLQMNSLRAEDTAVYYCAKISQFGSNAFDYWGQGTLVTVSS

SEQ ID NO: 226 - protein, 120 aa, Artificial Sequence
  TAR2h-107 anti-TNFR1 dAb
  VARIANT (62)...(62): Xaa= Any Amino Acid
EVQLLESGGGLVQPGGSLRLSCAASGFTFTRYSMGWVRQAPGKGLEWVSMIDTGGVHTYYAXSVKGRFTISRDNSKNTLYLQMNSLRAEDTAVYYCAKISQFGSNAFDYWGQGTLVTVSS

SEQ ID NO: 227 - protein, 120 aa, Artificial Sequence
  TAR2h-108 anti-TNFR1 dAb
EVQLLESGGGLVQPGGSLRLSCAASGFTFTRYSMGWVRQAPGKGLEWVSMIDVPGRHTYYADSVKGRFTISRDNSKNTLYLQMNSLRAEDTAVYYCAKISQFGSNAFDYWGQGTLVTVSS

SEQ ID NO: 228 - protein, 120 aa, Artificial Sequence
  TAR2h-109 anti-TNFR1 dAb
EVQLLESGGGLVQPGGSLRLSCAASGFTFTRYSMGWVRQAPGKGLEWVSMIAHAGPETYYADSVKGRFTISRDNSKNTLYLQMNSLRAEDTAVYYCAKISQFGSNAFDYWGQGTLVTVSS

SEQ ID NO: 229 - protein, 120 aa, Artificial Sequence
  TAR2h-110 anti-TNFR1 dAb
EVQLLESGGGLVQPGGSLRLSCAASGFTFTRYSMGWVRQAPGKGLEWVSMIDTRGVRTYYADSVKGRFTISRDNSKNTLYLQMNSLRAEDTAVYYCAKISQFGSNAFDYWGQGTLVTVSS

SEQ ID NO: 230 - protein, 120 aa, Artificial Sequence
  TAR2h-111 anti-TNFR1 dAb
EVQLLESGGGLVQPGGSLRLSCAASGFTFTRYSMGWVRQAPGKGLEWVSMIDVPGNHTYYADSVKGRFTISRDNSKNTLYLQMNSLRAEDTAVYYCAKISQFGSNAFDYWGQGTLVTVSS

SEQ ID NO: 231 - protein, 120 aa, Artificial Sequence
  TAR2h-112 anti-TNFR1 dAb
EVQLLESGGGLVQPGGSLRLSCAASGFTFTRYSMGWVRQAPGKGLEWVSMIDVGGRHTYYADSVKGRFTISRDNSKNTLYLQMNSLRAEDTAVYYCAKISQFGPNAFDYWGQGTLVTVSS

SEQ ID NO: 232 - protein, 118 aa, Artificial Sequence
  TAR2h-113 anti-TNFR1 dAb
EVQLLESGGGSVQPGGSLRLSCAASGFTFTRYSMGWVRQAPGKGLEWVSRIDSYGRGTYYADSVKGRFTISRDNSKNTLYLQMNSLRAEDTAVYYCAKVRSPYTFDYWGQGTLVTVSS

SEQ ID NO: 233 - protein, 117 aa, Artificial Sequence
  TAR2h-114 anti-TNFR1 dAb
EVQLLESGGGLVQPGGSLRLSCAASGFTFSGYNMGWVRQAPGKGLEWVSTISTQGYHTYYADSVKGRFTISRDNSKNTLYLQMNSLRAEDTAVYYCAKAFTSDFDYWGQGTLVTVSS

SEQ ID NO: 234 - protein, 119 aa, Artificial Sequence
  TAR2h-115 anti-TNFR1 dAb
EVQLLESGGGLVQPGGSLRLSCAASGFTFSGYNMYWVRQAPGKGLEWVSGISGPGLETYYADSVKGRFTISRDNSKNTLYLQMNSLRAEDTAVYYCAQGMSKTSTFDYWGQGTLVTVSS

SEQ ID NO: 235 - protein, 117 aa, Artificial Sequence
  TAR2h-116 anti-TNFR1 dAb
EVQLLESGGGLVQPGGSLRLSCAASGFTFTEYYMEWVRQAPGKGLEWVSSIDPDGSLTYYADSVKGRFTISRDNSKNTLYLQMNSLRAEDTAVYYCAKYPREKFDYWGQGTLVTVSS

SEQ ID NO: 236 - protein, 120 aa, Artificial Sequence
  TAR2h-117 anti-TNFR1 dAb
EVQLLESGGGLVQPGGSLRLSCAASGFTFDKYQMGWVRQAPGKGLEWVSFIDSNGHHTYYADSVKGRFTISRDNSKNTLYLQMNSLRAEDTAVYYCAQLSVQGSNLFDYWGQGTLVTVSS

SEQ ID NO: 237 - protein, 120 aa, Artificial Sequence
  TAR2h-118 anti-TNFR1 dAb
EVQLLESGGGLVQPGGSLRLSCAASGFTFVHYTMGWVRQAPGKGLEWVSWIHSDGVHTYYADSVKGRFTISRDNSKNTLYLQMNSLRAEDTAVYYCAKFTWGEKKTFDYWGQGTLVTVSS

SEQ ID NO: 238 - protein, 120 aa, Artificial Sequence
  TAR2h-119 anti-TNFR1 dAb
EVQLLESGGGLVQPGGSLRLSCAASGFTFMGYDMHWVRQAPGKGLEWVSGISAKGTETYYADSVKGRFTISRDNSKNTLYLQMNSLRAEDTAVYYCAKGSSGSDGLFDYWGQGTLVTVSS

SEQ ID NO: 239 - protein, 124 aa, Artificial Sequence; identical to SEQ ID NO: 170
  TAR2h-120 anti-TNFR1 dAb

SEQ ID NO: 240 - protein, 124 aa, Artificial Sequence
  TAR2h-121 anti-TNFR1 dAb
EVQLLESGGGLVQPGGSLRLSCAASGFTFVQYNMHWVRQAPGKGLEWVSGISSGGMRTYYADSVKGRFTISRDNSKNTLYLQMNSLRAEDTAVYYCAKGIRDSTLPRGTLFDYWGQGTLVTVSS

SEQ ID NO: 241 - protein, 121 aa, Artificial Sequence
  TAR2h-122 anti-TNFR1 dAb
EVQLLESGGGLVQPGGSLRLSCAASGFTFETYSMHWVRQAPGKGLEWVSSISLPGSRTYYADSVKGRFTISRDNSKNTLYLQMNSLRAEDTAVYYCAKHSKSSHRQSFDYWGQGTLVTVSS

SEQ ID NO: 242 - protein, 122 aa, Artificial Sequence
  TAR2h-123 anti-TNFR1 dAb
EVQLLESGGGLVQPGGSLRLSCAASGFTFNQYDMHWVRQAPGKGLEWVSGISFSGYETYYADSVKGRFTISRDNSKNTLYLQMNSLRAEDTAVYYCAKGRGPAPMRSLFDYWGQGTLVTVSS

SEQ ID NO: 243 - protein, 120 aa, Artificial Sequence
  TAR2h-124 anti-TNFR1 dAb
EVQLLESGGGLVQPGGSLRLSCAASGFTFVDYPMVWVRQAPGKGLEWVSHITSMGESTYYADSVKGRFTISRDNSKNMLYLQMNSLRAEDTAVYYCAKLPTHFPIRFDYWGQGTLVTVSS

SEQ ID NO: 244 - protein, 116 aa, Artificial Sequence
  TAR2h-125 anti-TNFR1 dAb
EVQLLESGGGLVQPGGSLRLSCAASGFTFKQYNMYWVRQAPGKGLEWVSFISPSGGETYYADSVKGRFTISRDNSKNTLYLQMNSLRAEDTAVYYCAKSIKPFDYWGQGTLVTVSS

SEQ ID NO: 245 - protein, 120 aa, Artificial Sequence
  TAR2h-126 anti-TNFR1 dAb
EVQLLESGGGLVQPGGSLRLSCAASGFTFSMYSMAWVRQAPGKGLEWVSFIDFDGLHTYYADSVKGRFTISRDNSKNTLYLQMNSLRAEDTAVYYCAKFSTSTMALFDYWGQGTLVTVSS

SEQ ID NO: 246 - protein, 122 aa, Artificial Sequence
  TAR2h-127 anti-TNFR1 dAb
EVQLLESGGGLVRPGGSLRLSCAASGFTFPEYNMHWVRQAPGKGLEWVSAIGTAGGSTYYADSVKGRFTISRDNSKNMLYLQMNSLRAEDTAVYYCAKGYRPRTGSMLFDYWGQGTLVTVSS

SEQ ID NO: 247 - protein, 120 aa, Artificial Sequence
  TAR2h-128 anti-TNFR1 dAb
EVQLLESGGGLVQPGGSLRLSCAASGFTFAKYNMYWVRQAPGKGLEWVSAISPKGQQTYYADSVKGRFTISRDNSKNTLYLQMNSLRAEDTAVYYCAEGMGSDAITFDYWGQGTLVTVSS

SEQ ID NO: 248 - protein, 122 aa, Artificial Sequence
  TAR2h-129 anti-TNFR1 dAb
EVQLLESGGGLVQPGGSLRLSCAASGFTFADYDMAWVRQAPGKGLEWVSFIDRKGHHTYYADSVKGRFTISRDNSKNTLYLQMNSLRAEDTAVYYCAKTTDIQRLNSAFDYWGQGTLVTVSS

SEQ ID NO: 249 - protein, 119 aa, Artificial Sequence
  TAR2h-130 anti-TNFR1 dAb
EVQLLESGGGLVQPGGSLRLSCAASGFTFGNGVMAWVRQAPGKGLEWVSHINENGGATYYADSVKGRFTISRDNSKNTLYLQMNSLRAEDTAVYYCAKPSIESPIFDYWGQGTLVTVSS

SEQ ID NO: 250 - protein, 119 aa, Artificial Sequence
  TAR2h-131 anti-TNFR1 dAb
EVQLLESGGGLVQPGGSLRLSCAASGFTFAHEPMVWVRQAPGKGLEWVSHIDRVGQDTYYADSVKGRFTISRDNSKNTLYLQMNSLRAEDTAVYYCAKLPKRGPRFDYWGQGTLVTVSS

SEQ ID NO: 251 - protein, 121 aa, Artificial Sequence
  TAR2h-132 anti-TNFR1 dAb
EVQLLESGGGLVQPGGSLRLSCAASGFTFEESVMGWVRQAPGKGLEWVSAISPGGSETYYADSVKGRFTISRDNSKNTLYLQMNSLRAEDAAVYYCAKRTGPPGSTVFDYWGQGTLVTVSS

SEQ ID NO: 252 - protein, 116 aa, Artificial Sequence
  TAR2h-133 anti-TNFR1 dAb
EVQLLESGGGLVQPGGSLRLSCAASGFTFGDEPMHWVRQAPGKGLEWVSGIGKEGQPTYYADSVKGRFTISRDNSKNTLYLQMNSLRAEDTAVYYCAKLGGPFDYWGQGTLVTVSS

SEQ ID NO: 253 - protein, 121 aa, Artificial Sequence
  TAR2h-151 anti-TNFR1 dAb
EVQLLESGGGLVQPGGSLRLSCAASGFTFDYGNMFWVRQAPGKGLEWVSAISGSGGSTYYADSVKGRFTISRDNSKNTLYLQMNSLRAEDTAVYYCAKDMTTDSPPGFDYWGQGTLVTVSS

SEQ ID NO: 254 - protein, 122 aa, Artificial Sequence
  TAR2h-152 anti-TNFR1 dAb
EVQLLESGGGLVQPGGSLRLSCAASGFTFAKETMSWVRQAPGKGLEWVSWISPHGALTYYADSVKGRFTISRDNSKNTLYLQMNSLRAEDTAVYYCAKPRFSYYPRVSFDYWGQGTLVTVSS

SEQ ID NO: 255 - protein, 119 aa, Artificial Sequence; identical to SEQ ID NO: 176
  TAR2h-153 anti-TNFR1 dAb

SEQ ID NO: 256 - protein, 119 aa, Artificial Sequence
  TAR2h-154 anti-TNFR1 dAb
  VARIANT (53)...(53): Xaa = Any Amino Acid
EVQLLESGGGLVQPGGSLRLSCAASGFTFGNGNMVWVRQAPGKGLEWVSHIDXYGTNTYYADSVKGRFTISRDNSKNTLYLQMNSLRAGDTAVYYCAKPRNDRPGFDYWGQGTLVTVSS

SEQ ID NO: 257 - protein, 124 aa, Artificial Sequence
  TAR2h-159 anti-TNFR1 dAb
EVQLLESGGGLVQPGGSLRLSCAASGFTFAGQDMRWVRQAPGKGLEWVSSIPSSGFNTYYADSVKGRFTISRDNSKNTLYLQMNSLRAEDTAVYYCAKRAKDRSVSQMPYFDYWGQGTLVTVSS

SEQ ID NO: 258 - protein, 120 aa, Artificial Sequence
  TAR2h-165 anti-TNFR1 dAb
EVQLLESGGGLVQPGGSLRLSCAASGFTFMRPDMVWVRQAPGKGLEWVSTIKDWGDQTYYADSVKGRFTISRDNSKNTLYLQMNSLRAEDAAVYYCAKADSRAQLDFDYWGQGTLVTVSS

SEQ ID NO: 259 - protein, 121 aa, Artificial Sequence
  TAR2h-166 anti-TNFR1 dAb
EVQLLESGGGLVQPGGSLRLSCAASGFTFSSYAMSWVRQAPGKGLEWVSAISGSGGSTYYADSVKGRFTISRDNSKNTLYLQMNSLRAEDTAVYYCAKPYFLFRATSFDYWGQGTLVTVSS

SEQ ID NO: 260 - protein, 120 aa, Artificial Sequence
  TAR2h-168 anti-TNFR1 dAb
EVQLLESGGGLVQPGGSLRLSCAASGFTFHDDDMVWVRQAPGKGLEWVSSIPGNGYVTYYADSVKGRFTISRDNSKNTLYLQMNSLRAEDTAVYYCAKRPDPTSVFFDYWGQGTLVTVSS

SEQ ID NO: 261 - protein, 116 aa, Artificial Sequence
  TAR2h-171 anti-TNFR1 dAb
EVQLLESGGGLVQPGGSLRLSCAASGFTFGDDWMTWVRQAPGKGLEWVSGIAAYGISTYYADSVKGRFTISRDNSKNTLYLQMNSLRAEDAAVYYCAESGKVFDYWGQGTLVTVSS

SEQ ID NO: 262 - protein, 120 aa, Artificial Sequence
  TAR2h-172 anti-TNFR1 dAb
EVQLLESGGGLVQPGGSLRLSCAASGFTFVERPMDWVRQAPGKGLEWVSLIGADGLSTYYADSVKGRFTISRDNSKNTLYLQMNSLRAEDTAVYYCAKLFRPGLLWFDYWGQGTLVTVSS

SEQ ID NO: 263 - protein, 119 aa, Artificial Sequence
  TAR2h-173 anti-TNFR1 dAb
EVQLLESGGGLVQPGGSLRLSCAASGFTFTGQDMQWVRQAPGKGLEWVSGINADGMATYYADSVKGRFTISRDNSKNTLYLQMNSLRAEDTAVYYCAKTSPTMRSFDYWGQGTLVTVSS

SEQ ID NO: 264 - protein, 118 aa, Artificial Sequence
  TAR2h-174 anti-TNFR1 dAb
EVQLLESGGGLVQPGGSLRLSCAASGFTFGEEYMQWVRQAPGKGLEWVSLIPHTGNPTYYADSVKGRFTISRDNSKNTLYLQMNSLRAEDTAVYYCAKLANSLLFDYWGQGTLVTVSS

SEQ ID NO: 265 - protein, 120 aa, Artificial Sequence
  TAR2h-176 anti-TNFR1 dAb
EVQLLESGGGLVQPGGSLRLSCAASGFTFHRCKMGWVRQAPGKGLEWVSFIEYDGRDTYYADSVKGRFTISRDNSKNTLYLQMNSLRAEDTAVYYCAKECTRPYGMFDYWGQGTLVTVSS

SEQ ID NO: 266 - protein, 120 aa, Artificial Sequence
  TAR2h-178 anti-TNFR1 dAb
EVQLLESGGGLVQPGGSLRLSCAASGFTFNRYSMGWLRQAPGKGLEWVSFIDKVGHHTWYEDPVKGRFTISRDNSKNTLYLQMNSLRAEDTAVYYCAKISQFGPNAFDYWGQGTQVTVSS

SEQ ID NO: 267 - protein, 120 aa, Artificial Sequence
  TAR2h-201 anti-TNFR1 dAb
  VARIANT (101)...(101): Xaa = Any Amino Acid
EVQLLESGGGLVQPGGSLRLSCAASGFTFTRYSMGWVRQAPGKGLEWVSMIAHAGPERYYADSVKGRFTISRDNSKNTLYLQMNSLRAEDTAVYYCAKISXFGSNAFDYWGQGTLVTVSS

SEQ ID NO: 268 - protein, 120 aa, Artificial Sequence
  TAR2h-202 anti-TNFR1 dAb
EVQLLESGGGLVQPGGSLRLSCAASGFTFTRYNMGWVRQAPGKGLEWVSFIDPPSVHTYYADSVKGRFTISRDNSKNTLYLQMNSLRAEDTAVYYCANISQFGSNAFDYWGQGTLVTVSS

SEQ ID NO: 269 - protein, 120 aa, Artificial Sequence
  TAR2h-203 anti-TNFR1 dAb
  VARIANT (96)...(96): Xaa = Any Amino Acid
EVQLLESGGGLVQPGGSLRLSCAASGFTFTRYSMGWVRQAPGKGLEWVSFIDPPSVHTYYADSVKGRFTISRDNSKNTLYLQMNSLRAEDTAVYYXAEISQFGSNAFDYWGQGTLVTVSS

SEQ ID NO: 270 - protein, 120 aa, Artificial Sequence
  TAR2h-204 anti-TNFR1 dAb
EVQLFESGGGLVQPGGSLRLSCAASGFTFTRYSMGWVRQAPGKGLEWVSMIAHAGPETYYADSVKGRFTISRDNSKNTLYLQMNSLRAEDTAVYYCAKISQFGSNALDYWGRGTLVTVSS

SEQ ID NO: 271 - protein, 122 aa, Artificial Sequence
  TAR2h-185-25 anti-TNFR1 dAb
EVQLLESGGGLVQPGGSLRLSCAASGFTFARYNMGWVRQAPGKGLEWVSLIDPSGGHTYYADSVKGRFTISRNNSKNTLYLQMNSLRAEDTAVYYCGKPVFSDWPAVEFDYWGQGTVVTVSS

SEQ ID NO: 272 - protein, 119 aa, Artificial Sequence
  TAR2h-154-10 anti-TNFR1 dAb
EVQLLESGGGMVQPGGSLRLSCAASGFTFEHEGMVWVRQAPGKGLEWVSHIGEDGQSTYYADSVKGRFTISRDNSKNTLYLQMNSLRAEDTAVYYCANIPKAGPSFDYWGQGTLVTVSS

SEQ ID NO: 273 - protein, 119 aa, Artificial Sequence
  TAR2h-205 anti-TNFR1 dAb
EVQLLESGGGLVQPGGSLRLSCAASGFTFVKYSMGWVRQAPGKGLEWVSQISNTGGHTYYADSVKGRFTISRDNSKNTLYLQMNSLRAEDTAVYYCAKYTGRWEPFDYWGQGTLVTVSS

SEQ ID NO: 274 - protein, 119 aa, Artificial Sequence
  TAR2h-5d1 anti-TNFR1 dAb
EVQLLESGGGLVQPGGSLRLSCAASGFTFPVYMMGWVRQAPGKGLEWVSSIDALGGRTGYADSVKGRFTISRDNSKNTLYLQMNSLRAEDTAVYYCAKTMSNKTHTFDYWGQGTLVTVS

SEQ ID NO: 275 - protein, 114 aa, Artificial Sequence
  TAR2h-5d2 anti-TNFR1 dAb
EVQLLESGGGLVQPGGSLRLSCAASGFTFVAYNMTWVRQAPGKGLEWVSSINTFGNTRYADSVKGRFTISRDNSKNTLYLQMNSLRAEDTAVYYCAKGSRPFDYWGQGTLVTVS

SEQ ID NO: 276 - protein, 118 aa, Artificial Sequence
  TAR2h-5d3 anti-TNFR1 dAb
EVQLLESGGGLVQPGGSLRLSCAASGFTFGYRMGWVRQAPGKGLEWVSWITRTGGTTQYADSVKGRFTISRDNSKNTLYLQMNSLRAEDTAVYYCAKPAKLVGVGFDYWGQGTLVTVS

SEQ ID NO: 277 - protein, 118 aa, Artificial Sequence
  TAR2h-5d4 anti-TNFR1 dAb
EVQLLESGGGLVQPGGSLRLSCAASGFTFRKYMGWVRQAPGKGLEWVSQIGAKGQSTDYADSVKGRFTISRDNSKNTLYLQMNSLRAEDTAVYYCAKKKRGENYFFDYWGQGTLVTVS

SEQ ID NO: 278 - protein, 119 aa, Artificial Sequence
  TAR2h-5d5 anti-TNFR1 dAb
EVQLLESGGGLVQPGGSLRLSCAASGFTFRRYSMSWVRQAPGKGLEWVSDISRSGRYTHYADSVKGRFTISRDNSKNTLYLQMNSLRAEDTAVYYCAKRIDSSQNGFDYWGQGTLVTVS

SEQ ID NO: 279 - protein, 114 aa, Artificial Sequence
  TAR2h-5d6 anti-TNFR1 dAb
EVQLLESGGGLVQPGGSLRLSCAASGFTFGYKMFWVRQAPGKGLEWVSAISGSGGSTYYADSVKGRFTISRDNSKNTLYLQMNSLRAEDTAVYYCAKQKENFDYWGQGTLVTVS

SEQ ID NO: 280 - protein, 119 aa, Artificial Sequence
  TAR2h-5d7 anti-TNFR1 dAb
EVQLLESGGGLVQPGGSLRLSCAASGFTFGDYAMWWVRQAPGKGLEWVSVISSNGGSTFYADSVKGRFTISRDNSKNTLYLQMNSLRAEDTAVYYCAKRVRKRTPEFDYWGQGTLVTVS

SEQ ID NO: 281 - protein, 119 aa, Artificial Sequence
  TAR2h-5d8 anti-TNFR1 dAb
EVQLLESGGGLVQPGGSLRLSCAASGFTFRRYKMGWVRQAPGKGLEWVSAIGRNGTKTNYADSVKGRFTISRDNSKNTLYLQMNSLRAEDTAVYYCAKIYTGKPAAFDYWGQGTLVTVS

SEQ ID NO: 282 - protein, 118 aa, Artificial Sequence
  TAR2h-5d9 anti-TNFR1 dAb
EVQLLESGGGLVQPGGSLRLSCAASGFTFKKYMSWVRQAPGKGLEWVSAISGSGGSTYYADSVKGRFTISRDNSKNTLYLQMNSLRAEDTAVYYCAKMLRTKNKVFDYWGQGTLVTVS

SEQ ID NO: 283 - protein, 119 aa, Artificial Sequence; identical to SEQ ID NO: 281
  TAR2h-5d10 anti-TNFR1 dAb

SEQ ID NO: 284 - protein, 118 aa, Artificial Sequence
  TAR2h-5d11 anti-TNFR1 dAb
EVQLLESGGGLVQPGGSLRLSCAASGFTFSYRMGWVRQAPGKGLEWVSSISSRGRHTSYADSVKGRFTISRDNSKNTLYLQMNSLRAEDTAVYYCAKRVPGRGRSFDYWGQGTLVTVS

SEQ ID NO: 285 - protein, 119 aa, Artificial Sequence
  TAR2h-5d12 anti-TNFR1 dAb
EVQLLESGGGLVQPGGSLRLSCAASGFPFRRYRMRWVRQAPGKGLEWVSGISPGGKHTTYADSVKGRFTISRDNSKNTLYLQMNSLRAEDTAVYYCAKGEGGASSAFDYWGQGTLVTVS

SEQ ID NO: 286 - protein, 118 aa, Artificial Sequence
  TAR2h-5d13 anti-TNFR1 dAb
EVQLLESGGGLVQPGGSLRLSCAASGFTFRYGMVWVRQAPGKGLEWVSAISGSGGSTYYADSVKGRFTISRDNSKNTLYLQMNSLRAEDTAVYYCAKRHSSEARQFDYWGQGTLVTVS

SEQ ID NO: 287 - protein, 118 aa, Artificial Sequence
  TAR2h-5d1 variant anti-TNFR1 dAb
EVQLLESGGGLVQPGGSLRLSCAASGFTFPVYMMGWVRQAPGKGLEWVSSIDALGGRTGYADSVKGRFTISRDNSKNTLYLQMNSLRAEDTAVYYCAKTMSNKTHTFDYWGQGTLVTS

SEQ ID NO: 288 - protein, 115 aa, Artificial Sequence
  TAR2h-5d2 variant anti-TNFR1 dAb
  VARIANT (57)...(57): Xaa = Any Amino Acid
EVQLLESGGGLVQPGGSLRLSCAASGFTFVAYNMTWVRQAPGKGLEWVSSINTFGNXTRYADSVKGRFTISRDNSKNTLYLQMNSLRAEDTAVYYCAKGSRPFDYWGQGTLVTVS

SEQ ID NO: 289 - protein, 119 aa, Artificial Sequence
  TAR2h-5d3 variant anti-TNFR1 dAb
  VARIANT (30)...(30): Xaa = Any Amino Acid
EVQLLESGGGLVQPGGSLRLSCAASGFTFXGYRMGWVRQAPGKGLEWVSWITRTGGTTQYADSVKGRFTISRDNSKNTLYLQMNSLRAEDTAVYYCAKPAKLVGVGFDYWGQGTLVTVS

SEQ ID NO: 290 - protein, 119 aa, Artificial Sequence
  TAR2h-5d4 variant anti-TNFR1 dAb
  VARIANT (33)...(33): Xaa = Any Amino Acid
EVQLLESGGGLVQPGGSLRLSCAASGFTFRKYXMGWVRQAPGKGLEWVSQIGAKGQSTDYADSVKGRFTISRDNSKNTLYLQMNSLRAEDTAVYYCAKKKRGENYFFDYWGQGTLVTVS

SEQ ID NO: 291 - protein, 115 aa, Artificial Sequence
  TAR2h-5d6 variant anti-TNFR1 dAb
  VARIANT (30)...(30): Xaa = Any Amino Acid
EVQLLESGGGLVQPGGSLRLSCAASGFTFXGYKMFWVRQAPGKGLEWVSAISGSGGSTYYADSVKGRFTISRDNSKNTLYLQMNSLRAEDTAVYYCAKQKENFDYWGQGTLVTVS

SEQ ID NO: 292 - protein, 119 aa, Artificial Sequence
  TAR2h-5d9 variant anti-TNFR1 dAb
  VARIANT (33)...(33): Xaa = Any Amino Acid
EVQLLESGGGLVQPGGSLRLSCAASGFTFKKYXMSWVRQAPGKGLEWVSAISGSGGSTYYADSVKGRFTISRDNSKNTLYLQMNSLRAEDTAVYYCAKMLRTKNKVFDYWGQGTLVTVS

SEQ ID NO: 293 - protein, 119 aa, Artificial Sequence
  TAR2h-5d11  variant anti-TNFR1 dAb
  VARIANT (30)...(30): Xaa = Any Amino Acid
EVQLLESGGGLVQPGGSLRLSCAASGFTFXSYRMGWVRQAPGKGLEWVSSISSRGRHTSYADSVKGRFTISRDNSKNTLYLQMNSLRAEDTAVYYCAKRVPGRGRSFDYWGQGTLVTVS

SEQ ID NO: 294 - protein, 119 aa, Artificial Sequence
  TAR2h-5d13  variant anti-TNFR1 dAb
  VARIANT (30)...(30): Xaa = Any Amino Acid
EVQLLESGGGLVQPGGSLRLSCAASGFTFXRYGMVWVRQAPGKGLEWVSAISGSGGSTYYADSVKGRFTISRDNSKNTLYLQMNSLRAEDTAVYYCAKRHSSEARQFDYWGQGTLVTVS

SEQ ID NO: 295 - protein, 119 aa, Artificial Sequence
  Tar2h-131-1 anti-TNFR1 dAb
EVQLLESGGGLVQPGGSLRLSCAASGFTFAHEPMVWVRQAPGKGLEWVSHIDRVGQDTYYADSVKGRFIISRDNSKNTLYLQMYSLRAEDTAVYYCAILPKRGPRFDYWGQGTLVTVSS

SEQ ID NO: 296 - protein, 119 aa, Artificial Sequence
  Tar2h-131-2 anti-TNFR1 dAb
EVQLLESGGGLVQPGGSLRLSCAASGFTFAHEPMVWVRQAPGKGLEWVSHIDRVGQDTYYADSVKGRFTISRDNSKNTLYLQMNSLRAEDTAVYYCARLPKRGPRFDYWGHGTLVTVSS

SEQ ID NO: 297 - protein, 119 aa, Artificial Sequence
  Tar2h-131-3 anti-TNFR1 dAb
EVQLLESGGGLVQPGGSLRLSCAASGFTFAHEPMVWVRQAPGKGLEWVSHIDRVGQDTYYADSVKGRFTISRDNSKNTLYLQMNSLRAEDTAVYYCAILPKRGPRFDYWGQGTLVTVSS

SEQ ID NO: 298 - protein, 119 aa, Artificial Sequence
  Tar2h-131-4 anti-TNFR1 dAb
EVQLLESGGGLVQPGGSLRLSCTASGFTFAHEPMVWVRQAPGKGLEWVSHIDRVGQDTYYADSVKGRFTISRDNSKNTLYLQMNSLRAEDTAVYYCARLPKRGPRFDYWGLGTLVTVSS

SEQ ID NO: 299 - protein, 119 aa, Artificial Sequence
  Tar2h-131-5 anti-TNFR1 dAb
EVKLLESGGGLVQPGGSLRLSCAASGFTFAHEPMVWIRQAPGKGLEWVSHIDRVGQDTYYADSVKGRYTISRDNSKNTLYLQMNSLRAEDTAVYYCARLPKRGPRFDYWGQGTLVTVSS

SEQ ID NO: 300 - protein, 119 aa, Artificial Sequence
  Tar2h-131-6 anti-TNFR1 dAb
EVQLLESGGGLVQPGGSLRLSCAASGFTFAHEPMVWVRQAPGKGLEWVSHIDRVGQDTYYADSVKGRFTISRDNSKNTLYLQMNSLRAEDTAVYYCARLPKRGPRFDYWGLGTLVTVSS

SEQ ID NO: 301 - protein, 119 aa, Artificial Sequence
  Tar2h-131-7 anti-TNFR1 dAb
EVQLLESGGGLVQPGGSLRLSCAASGFTFAHEPMVWVRQAPGKGLEWVSHIDRAGQDTYYADSVKGRFTISRDNSKNTLYLQMNSLRAEDTAVYYCARLPKRGPRFDYWGLGTLVTVSS

SEQ ID NO: 302 - protein, 119 aa, Artificial Sequence
  Tar2h-131-9 anti-TNFR1 dAb
EVQLLESGGGLVRPGGSLRLSCAASGFTFAHEPMVWVRQAPGKGLEWVSHIDRVGQDTYYADSVKGRFTISRDNSKNTLYLQMNSLRAEDTAVYYCARLPKRGPRFDYWGLGTLVTVSS

SEQ ID NO: 303 - protein, 119 aa, Artificial Sequence
  Tar2h-131-10 anti-TNFR1 dAb
EVQLLESGGGLVQPGGSLRLSCAASGFTFAHEPMVWVRQAPGKGLEWVSHIDRVGQDTYYADSVKGRFTISRDNSKNTLYLQMNSLRAEDTAIYYCARLPKRGPRFDYWGLGTLVTVSS

SEQ ID NO: 304 - protein, 119 aa, Artificial Sequence
  Tar2h-131-11 anti-TNFR1 dAb
EVQLLESGGGLVQPGGSLRLSCAASGFTFAHEPMVWVRQAPGKGLEWVSHIDRVGQDPYYADSVKGRFTISRDNSKNTLYLQMNSLRAEDTAVYYCARLPKRGPRFDYWGQGTLVTVSS

SEQ ID NO: 305 - protein, 119 aa, Artificial Sequence
  Tar2h-131-12 anti-TNFR1 dAb
EVQLLESGGGLVQPGGSLRLSCAASGFTFAHEPMVWIRQAPGKGLEWVSHIDRVGQDTYYADSVKGRFTISRDNSKNTLYLQMNSLRAEDTAVYYCAILPKRGPRFDYWGQGTLVTVSS

SEQ ID NO: 306 - protein, 119 aa, Artificial Sequence
  Tar2h-131-13 anti-TNFR1 dAb
EVQLLESGGGLVQPGGSLRLSCAASGFTFAHEPMVWVRQAPGKGLEWVSHIDRVGQDPYYADSVKGRFTISRDNSKNTLYLQMNSLRAEDTAVYYCARLPKRGPRFDYWGLGTLVTVSS

SEQ ID NO: 307 - protein, 119 aa, Artificial Sequence
  Tar2h-131-14 anti-TNFR1 dAb
EVQLLESGGGLVQPGGSLRLSCAASGFTFAHEPMVWVRQAPGKGLEWVSHIDRVGQDAYYADSVKGRFTISRDNSKNTLYLQMNSLRAEDTAVYYCAILPKRGPRFDYWGQGTLVTVSS

SEQ ID NO: 308 - protein, 119 aa, Artificial Sequence
  Tar2h-131-15 anti-TNFR1 dAb
EVQLLESGGGLVQPGGSLRLSCAASGFTFAHEPMVWVRQAPGKGLEWVSHIDRVGQDTYYADSVKGRSTISRDNSKNTLYLQMNSLRAEDTAIYYCARLPKRGPRFDYWGLGTLVTVSS

SEQ ID NO: 309 - protein, 119 aa, Artificial Sequence
  Tar2h-131-16 anti-TNFR1 dAb
EVQLLESGGGLVQPGGSLRLSCAASGFTFAHEPMVWVRQAPGKGLEWVSHIDRVGQDTYYADSVKGRFTISRDNSKNTLYLQMNSLRAEDTAIYYCARPPKRGPRFDYWGLGTLVTVSS

SEQ ID NO: 310 - protein, 119 aa, Artificial Sequence
  Tar2h-131-17 anti-TNFR1 dAb
EVQLLESGGGLVQPGGSLRLSCAASGFTFAHEPMVWVRQAPGKGLEWVSHIDRVGQDTYYADSVKGRFTISRDNSKNTLYLQMNSLRAKDTAIYYCARLPKRGPRFDYWGLGTLVTVSS

SEQ ID NO: 311 - protein, 119 aa, Artificial Sequence
  Tar2h-131-18 anti-TNFR1 dAb
EVQLLESGGGLVQPGGSLRLSCAASGFTFAHEPMVWVRQAPGKGLEWVSHIDRVGQDTYYADSAKGRFTISRDNSKNTLYLQMNSLRAEDTAIYYCARLPKRGPRFDYWGLGTLVTVSS

SEQ ID NO: 312 - protein, 119 aa, Artificial Sequence
  Tar2h-131-19 anti-TNFR1 dAb
EVQLLESGGGLVQPGGSLRLSCAASGFTFAHEPMVWVRQAPGKGLEWVSHIDRVGQDTYYADSVKGRFTISRDNSKNTLYPQMNSLRAEDTAIYYCARLPKRGPRFDYWGLGTLVTVSS

SEQ ID NO: 313 - protein, 119 aa, Artificial Sequence
  Tar2h-131-20 anti-TNFR1 dAb
EVQLLESGGGLVQPGGSLRLSCAASGFTFAHEPMVWVRQAPGKGLEWVSHIDRVGQDTYYADSVKGRFTVSRDNSKNTLYLQMNSLRAEDTAIYYCARLPKRGPRFDYWGLGTLVTVSS

SEQ ID NO: 314 - protein, 119 aa, Artificial Sequence
  Tar2h-131-21  anti-TNFR1 dAb
EVQLLESGGGLVQPGGSLRLSCAASGFTFAHEPMVWVRQAPGKGLEWVSHIDRVGQDTYYADSVKGRFIISRDNSKNTLYLQMYSLRAEDTAVYYCAMLPKRGPRFGYWGQGTLVTVSS

SEQ ID NO: 315 - protein, 119 aa, Artificial Sequence
  Tar2h-131-22  anti-TNFR1 dAb
EVQLLESGGGLVQPGGSLRLSCAASGFTFAHEPMVWVRQAPGKGLEWVSHIDRVGQDTYYADSVKGRFTISRDNSKNTLYLQMNSLCAEDTAIYYCARLPKRGPRFDYWGLGTLVTVSS

SEQ ID NO: 316 - protein, 119 aa, Artificial Sequence
  Tar2h-131-23  anti-TNFR1 dAb
EVQLLESGGGLIQPGGSLRLSCAASGFTFAHETMVWVRQAPGKGLEWVSHIDRVGQDTYYADSVKGRFTISRDNSKNTLYLQMNSLRAEDTAVYYCAGLPKRGPWFDYRGQGTLVTVSS

SEQ ID NO: 317 - protein, 119 aa, Artificial Sequence
  Tar2h-131-25 anti-TNFR1 dAb
EVQLLESGGGLIQPGGSLRLSCAASGFTFAHETMVWVRQAPGKGLEWVSHIDRVGQDTYYADSVKGRFTISRDNSKNTLYLQMNSLRAEDTAVYYCAQLPKRGPWFDYRGQGTLVTVSS

SEQ ID NO: 318 - protein, 119 aa, Artificial Sequence
  Tar2h-131-26 anti-TNFR1 dAb
EVQLLESGGGLIQPGGSLRLSCAASGFTFAHETMVWVRQAPGKGLEWVSHIDRVGQDTYYADSVKGRFTISRDNSKNTLYLQMNSLRVEDTAVYYCASLPKRGPWFDYRGQGTLVTVSS

SEQ ID NO: 319 - protein, 119 aa, Artificial Sequence
  Tar2h-131-27 anti-TNFR1 dAb
EVQLLESGGGLYQPGGSLRLSCAASGFTFAHETMVWVRQAPGKGLEWVSHIDRVGQDTYYADSVKGRFTISRDNSKNTLYLQMNSLRAEDTAVYYCAKLPKRGPWFDYRGQGTLVTVSS

SEQ ID NO: 320 - protein, 119 aa, Artificial Sequence
  Tar2h-131-28 anti-TNFR1 dAb
EVQLLESGGGLGQPGGSLRLSCAASGFTFAHETMVWVRQAPGKGLEWVSHIDRVGQDTYYADSVKGRFTISRDNSKNTLYLQMNSLRAEDTAVYYCAKLPKRGPWFDYRGQGTLVTVSS

SEQ ID NO: 321 - protein, 119 aa, Artificial Sequence
  Tar2h-131-29 anti-TNFR1 dAb
  VARIANT (12)...(12): Xaa = Any Amino Acid
EGQLLESGGGLXQPGGSLLLSCAASGFTFAHETMVWVRQAPGKGLEWVSHIDRVGQDTYYADSVKGRFTISRDNSKNTLYLQMNSLRAEDTAVYYCAKLPKRGPWFDYRGQGTLVTVSS

SEQ ID NO: 322 - protein, 119 aa, Artificial Sequence
  Tar2h-131-30 anti-TNFR1 dAb
EVQLLESGGGLVQPGGSLRLSCAASGFTFAHETMVWVRQAPGKGLEWVSHIDRVGQDTYYADSVKGRFTISRDNSKNTLYLQMNSLRAEDTAVYYCAKLPKRGPWFDYRGQGTLVTVSS

SEQ ID NO: 323 - protein, 119 aa, Artificial Sequence
  Tar2h-131-31 anti-TNFR1 dAb
EVQLLESGGGLIQPGGSLRLSCAASGFTFAHETMVWVRQAPGKGLEWVSHIDRVGQDPYYADSVKGRFTISRDNSKNTLYLQMNSLRAEDTAVYYCAKLPKRGPWFDYRGQGTLVTVSS

SEQ ID NO: 324 - protein, 119 aa, Artificial Sequence
  Tar2h-131-32 anti-TNFR1 dAb
EGQLLESGGGLIQPGGSLRLSCGASGFTFAHETMVWVRQAPGKGLEWVSHIDRVGQDPYYADSVKGRFTISRDNSKNTLYLQMNSLRAEDTAVYYCAKLPKRGPWFDYRGQGTLVTVSS

SEQ ID NO: 325 - protein, 119 aa, Artificial Sequence
  Tar2h-131-33 anti-TNFR1 dAb
EVQLLESGGGLIQPGGSLRLSCAASGFTFAHETMVWVRQAPGKGLEWVSHIDRVGQDNYYADSVKGRFTISRDNSKNTLYLQMNSLRAEDTAVYYCAKLPKRGPWFDYRGQGTLVTVSS

SEQ ID NO: 326 - protein, 119 aa, Artificial Sequence
  Tar2h-131-34 anti-TNFR1 dAb
EVQLLESGGGLIQPGGSLRLSCAASGFTFAHETMVWVRQAPGKGLEWVSHIDRVGQDTYYADSVKGRFTISRDNSKNTLYLQMNSLRAEDTAVYYCAKLPKRGPGFDYRGQGTLVTVSS

SEQ ID NO: 327 - protein, 119 aa, Artificial Sequence
  Tar2h-131-35 anti-TNFR1 dAb
EVQLLESGGGLIQPGGSLRLSCAASGFTFAHETMVWVRQAPGKGLEWVSHIDRVGQDTYYADSVKGRFTISRDNSKNTLYLQMNSLRAEDTAVYYCAKLPKRGPVFDYRGQGTLVTVSS

SEQ ID NO: 328 - protein, 119 aa, Artificial Sequence
  Tar2h-131-36 anti-TNFR1 dAb
EVQLLESGGGLIQPGGSLRLSCAASGFTFAHETMVWVRQAPGKGLEWVSHIDRVGQDTYYADSVKGRFTISRDNSKNTLYLQMNSLRAEDTAVYYCAKLPKRGPWFDYYGQGTLVTVSS

SEQ ID NO: 329 - protein, 119 aa, Artificial Sequence
  Tar2h-131-37 anti-TNFR1 dAb
EGQLLESGGGLIQPGGSLLLSCAPSGFTFAHETMVWVRQAPGKGLEWVSHIDRVGQDTYYADSVKGRFTISRDNSKNTLYLQMNSLRAEDTAVYYCAKLPKRGPWFDYKGQGTLVTVSS

SEQ ID NO: 330 - protein, 119 aa, Artificial Sequence
  Tar2h-131-38 anti-TNFR1 dAb
EVQLLESGGGLIQPGGSLRLSCAASGFTFAHETMVWVRQAPGKGLEWVSHIDRVGQDTYYADSVKGRFTISRDNSKNTLYLQMNSLRAEDTAVYYCAKLPKRGPWFDYVGQGTLVTVSS

SEQ ID NO: 331 - protein, 119 aa, Artificial Sequence
  Tar2h-131-39 anti-TNFR1 dAb
EVQLLESGGGLIQPGGSLRLSCAASGFTFAHETMVWVRQAPGKGLEWVSHIDRVGQDTYYADSVKGRFTISRDNSKNTLYLQMNSLRAEDTAVYYCAKLPKRGPWFDYLGQGTLVTVSS

SEQ ID NO: 332 - protein, 119 aa, Artificial Sequence
  Tar2h-131-40 anti-TNFR1 dAb
EVQLLESGGGLVQPGGSLRLSCAASGFTFAHEPMVWVRQAPGKGLEWVSHIDRVGQDTYYADSVKGRFTISRDNSKNTLYLQMNSLRAEDTAVYYCASLPKRGPRFDYWGQGTLVTVSS

SEQ ID NO: 333 - protein, 119 aa, Artificial Sequence
  Tar2h-131-41 anti-TNFR1 dAb
EVQLLESGGGLVQPGGSLRLSCAASGFTFAHEPMVWVRQAPGKGLEWVSHIDRVGQDTYYADSVKGRFTISRDNSKNTLYLQMNSLRAEDTAVYYCAGLPKRGPRFDYWGQGTLVTVSS

SEQ ID NO: 334 - protein, 119 aa, Artificial Sequence
  Tar2h-131-42 anti-TNFR1 dAb
EVQLLESGGGLVQPGGSLRLSCAASGFTFAHEPMVWVRQAPGKGLEWVSHIDRVGQDTYYADSVKGRFTISRDNSKNTLYLQMNSLRAEDTAVYYCARLPKRGPRFDYWGQGTLVTVSS

SEQ ID NO: 335 - protein, 119 aa, Artificial Sequence
  Tar2h-131-43 anti-TNFR1 dAb
EVQLLESGGGLVQPGGSLRLSCAASGFTFAHEPMVWVRQAPGKGLGWVSHIDRVGQDTYYADSVKGRFTISRDNSKNTLYLQMNSLRAEDTAVYYCAPLPKRGPRFDYWGQGTLVTVSS

SEQ ID NO: 336 - protein, 119 aa, Artificial Sequence; identical to SEQ ID NO: 297
  Tar2h-131-44 anti-TNFR1 dAb

SEQ ID NO: 337 - protein, 119 aa, Artificial Sequence
  Tar2h-131-45 anti-TNFR1 dAb
EVQLLESGGGLVQPGGSLRLSCAASGFTFAHEPMVWIRQAPGKGLEWVSHIDRVGQDTYYADSVKGRFTISRDNSKNTLYLQMNSLRAEDTAVYYCAMLPKRGPRFDYWGQGTLVTVSS

SEQ ID NO: 338 - protein, 119 aa, Artificial Sequence
  Tar2h-131-46 anti-TNFR1 dAb
EVQLLESGGGLVQPGGSLRLSCAASGFTFAHEPMVWVRQAPGKGLEWVSHIDRVGQDTYYADSVKGRFTISRDNSKNTLYLQMNSLRAEDTAVYYCALLPKRGPRFDYWGQGTLVTVSS

SEQ ID NO: 339 - protein, 119 aa, Artificial Sequence
  Tar2h-131-47 anti-TNFR1 dAb
  VARIANT (32)...(32): Xaa = Any Amino Acid
EVQLLESGGGLIQPGGSLRLSCAASGFTFAHXTMVWVRQAPGKGLEWVSHIDRVGQDKYYADSVKGRFTISRDNSKNTLYLQMNSLRAEDTAVYYCAKLPKRGPWFDYRGQGTLVTVSS

SEQ ID NO: 340 - protein, 119 aa, Artificial Sequence
  Tar2h-131-48 anti-TNFR1 dAb
  VARIANT (32)...(32): Xaa = Any Amino Acid
EVQLLESGGGLIQPGGSLRLSCAASGFTFAHXTMVWVRQAPGKGLEWVSHIDRVGQDTYYADSVKGRFTISRDNSKNTLYLQMNSLRAEDTAVYYCAKLPKRGPWFDYIGQGTLVTVSS

SEQ ID NO: 341 - protein, 119 aa, Artificial Sequence
  Tar2h-131-49 anti-TNFR1 dAb
EVQLLESGGGLIQPGGSLRLSCAASGFTFAHETMVWVRQAPGKGLEWVSHIDRVGQDTYYADSVKGRFTISRDNSKNTLYLQMNSLRAEDTAVYYCAKLPKRGPWFDYNGQGTLVTVSS

SEQ ID NO: 342 - protein, 119 aa, Artificial Sequence
  Tar2h-131-50 anti-TNFR1 dAb
EVQLLESGGGLIQPGGSLRLSCAASGFTFAHEVMVWVRQAPGKGLEWVSHIDRVGQDTYYADSVKGRFTISRDNSKNTLYLQMNSLRAEDTAVYYCAKLPKRGPWFDYRGQGTLVTVSS

SEQ ID NO: 343 - protein, 119 aa, Artificial Sequence
  Tar2h-131-51 anti-TNFR1 dAb
EVQLLESGGGLIQPGGSLRLSCAASGFTFAHELMVWVRQAPGKGLEWVSHIDRVGQDTYYADSVKGRFTISRDNSKNTLYLQMNSLRAEDTAVYYCAKLPKRGPWFDYRGQGTLVTVSS

SEQ ID NO: 344 - protein, 119 aa, Artificial Sequence
  Tar2h-131-52 anti-TNFR1 dAb
EVQLLESGGNLVQPGGSLRLSCAASGFTFAHETMVWVRQAPGKGLEWVSHIDRVGQDTYYADSVKGRFTISRDNSKNTLYLQMNSLRAEDTAVYYCAKLPKRGPWFDYRGQGTLVTVSS

SEQ ID NO: 345 - protein, 119 aa, Artificial Sequence; identical to SEQ ID NO: 322
  Tar2h-131-53 anti-TNFR1 dAb

SEQ ID NO: 346 - protein, 119 aa, Artificial Sequence
  Tar2h-131-54 anti-TNFR1 dAb
EVQLLESGGGLIQPGGSLRLSCAASGFTFAHKTMVWVRQAPGKGLEWVSHIDRVGQDTYYADSVKGRFTISRDNSKNTLYLQMNSLRAEDTAVYYCALLPKRGPWFDYRGQGTLVTVSS

SEQ ID NO: 347 - protein, 119 aa, Artificial Sequence
  Tar2h-131-55 anti-TNFR1 dAb
EVQLLESGGGLIQPGGSLRLSCAASGFTFAHETMVWVRQAPGKGLEWVSHIDRVGQDTYYADPVKGRFTISRDNSKNTLYLQMNSLRAEDTAVYYCARLPKRGPWFDYRGQGTLATVSS

SEQ ID NO: 348 - protein, 119 aa, Artificial Sequence
  Tar2h-131-56 anti-TNFR1 dAb
EVQLLESGGGLIQPGGSLRLSCAASGFTFAHETMVWVRQAPGKGLEWVSHIDRVGQDTYYADSVKGRFTISRDNSKNSLYLQMNSLRAEDTAVYYCAVLPKRGPWFDYRGQGTLVTVSS

SEQ ID NO: 349 - protein, 119 aa, Artificial Sequence
  Tar2h-131-57 anti-TNFR1 dAb
EVQLLESGGGLIQPGGSLRLSCAASGFTFAHETMVWVRQAPGKGLEWVSHIDRVGQDTYYADSVKGRFTISRDNPKNTLYLQMNSLRAEDTAVYYCARLPKRGPWFDYRGQGTLVTVSS

SEQ ID NO: 350 - protein, 119 aa, Artificial Sequence
  Tar2h-131-58 anti-TNFR1 dAb
EVQLLESGGGLIQPGGSLRLSCAASGFTFAHDTMVWVRQAPGKGLEWVSHIDRVGQDTYYADSVKGRFTISRDNSKNTLYLQMNSLRAEDTAVYYCARLPKRGPWFDYQGQGTLVTVSS

SEQ ID NO: 351 - protein, 119 aa, Artificial Sequence
  Tar2h-131-59 anti-TNFR1 dAb
EVQLLESGGGLIQPGGSLRLSCAASGFTFAHDTMVWVRQAPGKGLEWVSHIDRVGQDTYYADSVKDRFTISRDNSKNTLYLQMNSLRAEDTAVYYCAVLPKRGPWFDYRGQGTLVTVSS

SEQ ID NO: 352 - protein, 119 aa, Artificial Sequence
  Tar2h-131-60 anti-TNFR1 dAb
EVQLLESGGGLIQPGGSLRLSCAASGFTFAHETMVWVRQAPGKGLEWVSHIDRVGQDTYYADSVKGRFTISRDNSKNTLFLQMNSLRAEDTAVYYCARLPKRGPWFDYRGRGTLVTVSS

SEQ ID NO: 353 - protein, 119 aa, Artificial Sequence
  Tar2h-131-61 anti-TNFR1 dAb
EVQLLESGGGLIQPGGSLRLSCAASGFTFAHETMVWVRQAPGKGLEWVSHIDRVGQDTYYADSVEGRFTISRDNSKNTLYLQMNSLRAEDTAVYYCAVLPKRGPWFDYRGQGTLVTVSS

SEQ ID NO: 354 - protein, 119 aa, Artificial Sequence
  Tar2h-131-62 anti-TNFR1 dAb
EVQLLESGGGLIQPGGSLRLSCAASGFTFAHETMVWVRQAPGKGLEWVSHIDRVGQDTYYADSVEGRFTISRDNSKNTLYLQMNSLRAEDTAVYYCALLPKRGPWFDYRGQGTLVTVSS

SEQ ID NO: 355 - protein, 119 aa, Artificial Sequence
  Tar2h-131-63 anti-TNFR1 dAb
EVQLLESGGGLIQPGGSLRLSCAASGFTFAHETMVWVRQAPGKGQEWVSHIDRVGQDTYYADSVKGRFTISRDNSKNSLYLQMNSLRAEDTAVYYCAVLPKRGPWFDYRGQGTLVTVSS

SEQ ID NO: 356 - protein, 119 aa, Artificial Sequence
  Tar2h-131-64 anti-TNFR1 dAb
EVQLSESGGGLIQPGGSLRLSCVASGFTFAHETMVWVRQAPGKGLEWVSHIDRVGQDTYYADSVKGRFTISRDNSKNTLYLQMNSLRAEDTAVYYCAILPKRGPWFDYRGQGTLVTVSS

SEQ ID NO: 357 - protein, 119 aa, Artificial Sequence
  Tar2h-131-65 anti-TNFR1 dAb
EVQLLESGGGLIQPGGSLRLTCAASGFTFAHETMVWVRQAPGKGLEWVSHIDRVGQDTYYADSVKGRFTISRDNSKNTLYLQMNSLRAEDTAVYYCAVLPKRGPWFDYRGQGTLVTVSS

SEQ ID NO: 358 - protein, 119 aa, Artificial Sequence
  Tar2h-131-66 anti-TNFR1 dAb
EVQLLESGGGLIQPGGSLRLSCAASGFTFAHETMVWVRQAPGKGLEWVSHIDRVGQDTYYADSVKGRFTISRDNSMNTLYLQMNSLRAEDTAVYYCALLPKRGPWFDYRGQGTLVTVSS

SEQ ID NO: 359 - protein, 119 aa, Artificial Sequence
  Tar2h-131-67 anti-TNFR1 dAb
EVQLLESGGGSIQPGGSLRLSCAASGFTFAHETMVWVRQAPGKGLEWVSHIDRVGQDTYYADSVKGRFTISRDNSKNTLYLQMNSLRAEDTAVYYCAVLPKRGPWFDYRGQGTLVTVSS

SEQ ID NO: 360 - protein, 119 aa, Artificial Sequence
  Tar2h-131-68 anti-TNFR1 dAb
EVQLLESGGGLIQPGGSLRLSCAASGFTFAHETMVWVRQAPGKGLEWVSHIDRVGQDTYYADSVKGRFTISRNNSMNTLYLQMNSLRAEDTAVYYCAILPKRGPWFDYRGQGTLVTVSS

SEQ ID NO: 361 - protein, 119 aa, Artificial Sequence
  Tar2h-131-69 anti-TNFR1 dAb
EVQLLESGGGLIQPGGSLRLSCAASGFTFAHETMVWVRQAPGRGLEWVSHIDRVGQDTYYADSVKGRFTISRDNSKNTLYLQMNSLRAEDTAVYYCAVLPKRGPWFDYRGQGTLVTVSS

SEQ ID NO: 362 - protein, 119 aa, Artificial Sequence
  Tar2h-131-70 anti-TNFR1 dAb
EVQLLESGGGLIQPGGSLRLSCAASGFTFAHETMVWVRQAPGKGLEWVSHIDRVGQDPYYADSVKGRFTISRDNSKNTLYLQMNSLRAEDTAVYYCALLPKRGPWFDYRGQGTLVTVSS

SEQ ID NO: 363 - protein, 119 aa, Artificial Sequence
  Tar2h-131-71 anti-TNFR1 dAb
EVQLLESGGGLIQPGGSLRLSCAASGFTFAHETMVWVRQAPGKGLEWVSHIDRVGQDTYYADSVKGRFTISRDNSKNTLYLQMNSLRAEDTAVYYCAMLPKRGPWFDYRGQGTLVTVSS

SEQ ID NO: 364 - protein, 119 aa, Artificial Sequence
  Tar2h-131-72 anti-TNFR1 dAb
EVQLLESGGGLIQPGGSLRLSCAASGFTFAHDTMVWVRQAPGKGLEWVSHIDRVGQDTYYADSVKGRFTISRDNTKNTLYLQMNSLRAEDTAVYYCALLPKRGPWFDYRGQGTLVTVSS

SEQ ID NO: 365 - protein, 119 aa, Artificial Sequence
  Tar2h-131-73 anti-TNFR1 dAb
EVQLLESGGGLIEPGGSLRLSCAASGFTFAHETMVWVRQAPGKGLEWVSHIDRVGQDTYYADSVKGRFTISRDNSKNTLYLQMNSLRAEDSAVYYCARLPKRGPWFDYRGQGTLVTVSS

SEQ ID NO: 366 - protein, 119 aa, Artificial Sequence
  Tar2h-131-74 anti-TNFR1 dAb
DVQLLESGGGLIQPGGSLRLSCAASGFTFAHETMVWVRQAPGKGLEWVSHIDRVGQDTYYADSVKGRFTISRDNSKNTLYLQMNSLRAEDTAAYYCAVLPKRGPWFDYRGQGTLVTVSS

SEQ ID NO: 367 - protein, 119 aa, Artificial Sequence
  Tar2h-131-75 anti-TNFR1 dAb
EVQLMESGGGLIQPGGSLRLSCAASGFTFAHETMVWVRQAPGKGLEWVSHIDRVGQDTYYADSVKGRFTISRDNSKNTLYLQMNSLRAEDTAVYYCAELPKRGPWFDHRGQGTLVTVSS

SEQ ID NO: 368 - protein, 119 aa, Artificial Sequence
  Tar2h-131-76 anti-TNFR1 dAb
EVQLLESGGGLIQPGGSLRLSCAASGFTFAHETMVWVRQAPGKGLEWVSHIDRVGQDTYYADSVKGRFAISRDNSKNTLYLQMNSLRAEDTAVYYCAMLPKRGPWFDYRGQGTLVTVSS

SEQ ID NO: 369 - protein, 119 aa, Artificial Sequence
  Tar2h-131-77 anti-TNFR1 dAb
EVQLLESGGGLIQPGGSLRLSCAASGFTFAHETMVWVRQAPGKGLEWVSHIDRVGQDTYYTDSVKGRFTISRDNSKNTLYLQMNSLRAEDTAVYYCALLPKRGPWFDYRGQGTMVTVSS

SEQ ID NO: 370 - protein, 119 aa, Artificial Sequence
  Tar2h-131-78 anti-TNFR1 dAb
EVQLLESGGGLMQPGGSLRLSCAASGFTFAHETMVWVRQAPGKGLEWVSHIDLVGQDTYYADSVKGRFTISRDNSKNTLYLQMNSLRAEDTAVYHCARLPKRGPWFDYRGQGTLVTVSS

SEQ ID NO: 371 - protein, 119 aa, Artificial Sequence
  Tar2h-131-79 anti-TNFR1 dAb
EVQLLESGGGLIQPGGSLRLSCATSGFTFAHETMVWVRQAPGKGLEWVSHIDRVGQDTYYADSVKGRFTISRDNSKNTLYMQMNSLRAEDTAVYYCAVLPKRGPWFDYQGQGTLVTVSS

SEQ ID NO: 372 - protein, 119 aa, Artificial Sequence
  Tar2h-131-80 anti-TNFR1 dAb
EVQLLESGGGLIQPGGSLRLSCAASGFTFAHETMVWVRQAPGKGLEWVSHIDRVGQDTYYADPVKGRFTISRDNSRNTLYLQMNSLRSEDTAVYYCAVLPKRGPWFDYRGQGTLVTVSS

SEQ ID NO: 373 - protein, 119 aa, Artificial Sequence
  Tar2h-131-81 anti-TNFR1 dAb
EVQLLESGGGLIQPGGSLRLSCAASGFTFAHETMVWVRQAPGKGLEWVSHIDRVGQDTYYADSVKGRFTISRDNSKNTLYLQMNSLRAEDTAVYSCALLPKRGPWFDYRGQGTLVTVSS

SEQ ID NO: 374 - protein, 119 aa, Artificial Sequence
  Tar2h-131-82 anti-TNFR1 dAb
EVQLLESGGGLIQPGGSLRLSCAASGFTFAHETMVWVRQAPGKGLEWVSHIDRVGQDTYYADSVKGRFTISRDNSKNALYLQMNSLRAEDTAVYYCAVLPKRGPWFDYRGQGTLVTVSS

SEQ ID NO: 375 - protein, 119 aa, Artificial Sequence
  Tar2h-131-83 anti-TNFR1 dAb
EVQLLESGGGLVQPGGSLRLSCAASGFTFAHETMVWVRQAPGKGLEWVSHIDRVGQDTYYADSVKGRFTISRDNSKNTLYLQMNSLRAEDTAVYYCALLPKRGPWFDYWGQGTLVTVSS

SEQ ID NO: 376 - protein, 119 aa, Artificial Sequence
  Tar2h-131-86 anti-TNFR1 dAb
EVQLLESGGGLIQPGGSLRLSCAASGFTFAHETMVWVREAPGKGLEWVSHIDRVGQDTYYADSVKGRFTISRDNSKNTLYLQMNSLRAEDTAVYYCAILPKRGPWFDYRGQGTLVTVSS

SEQ ID NO: 377 - protein, 119 aa, Artificial Sequence; identical to SEQ ID NO: 353
  Tar2h-131-87 anti-TNFR1 dAb

SEQ ID NO: 378 - protein, 119 aa, Artificial Sequence
  Tar2h-131-88 anti-TNFR1 dAb
EVQLLESGGGLIQPGGSLRLSCAASGFTFAHETMVWVRQAPGKGLEWVSHIDRVGQDTYYADPVKGRFTISRDNSRNTLYLQMNSLRAEDTAVYYCAVLPKRGPWFDYRGQGTLVTVSS

SEQ ID NO: 379 - protein, 119 aa, Artificial Sequence
  Tar2h-131-89 anti-TNFR1 dAb
EVQLLESGGDLIQPGGSLRLSCAASGFTFAHETMVWVRQAPGKGLEWVSHIDRVGQDTYYADSVKGRFTISRDNSKNTLYLQMNSLRAEDTAVYYCAVLPKRGPWFDYRGQGTLVTVSS

SEQ ID NO: 380 - protein, 119 aa, Artificial Sequence; identical to SEQ ID NO: 359
  Tar2h-131-90 anti-TNFR1 dAb

SEQ ID NO: 381 - protein, 119 aa, Artificial Sequence
  Tar2h-131-91 anti-TNFR1 dAb
EVQLLESGGGLIQPGGSLHLSCAASGFTFEHETMVWVRQAPGKGLEWVSHIDRVGQDPYYADSVKGRFTISRDNSKNTLYLQMNSLRAEDTAVYYCARLPKRGPWFDYRGQGTLVTVSS

SEQ ID NO: 382 - protein, 119 aa, Artificial Sequence
  Tar2h-131-92 anti-TNFR1 dAb
EVQLLESGGGLIQPGGSLRLSCAASGFTFAHDTMVWVRQAPGKGLEWVSHIDRVGQDTYYADSVKGRFTISRDNSKNTLYLQMNSLRAEDTAVYYCARLPKRGPWFDYRGQGTLVTVSS

SEQ ID NO: 383 - protein, 119 aa, Artificial Sequence
  Tar2h-131-93 anti-TNFR1 dAb
EVQLLESGGGLIQPGGSLRLSCAASGFTFAHETMVWVRQAPGKGLEWVSHIDRVGQDPYYADSVKGRFTISRDNSKNTLYLQMNSLRAEDTAVYYCARLPKRGPWFDYRGQGTLVTVSS

SEQ ID NO: 384 - protein, 119 aa, Artificial Sequence
  Tar2h-131-94 anti-TNFR1 dAb
EVQLLESGGGLIQPGGSLRLSCAASGFTFAHETMVWVRQAPGKDLEWVSHIDRVGQDTYYADSVKGRFTISRDNSKNTLYLQMNSLRAEDTAVYYCAVLPKRGPWFDYRGQGTLVTVSS

SEQ ID NO: 385 - protein, 119 aa, Artificial Sequence; identical to SEQ ID NO: 382
  Tar2h-131-95 anti-TNFR1 dAb

SEQ ID NO: 386 - protein, 119 aa, Artificial Sequence
  Tar2h-131-96 anti-TNFR1 dAb
EVQLLESGGGLIQPGGSLRLSCAASGFTFAHETMVWVRQAPGKGLEWVSHIDRVGQDTYYADSVKGRFTISRDNSKNTLYLQMNSLRAEDTAVYHCAVLPKRGPWFDYRGQGTLVTVSS

SEQ ID NO: 387 - protein, 119 aa, Artificial Sequence
  Tar2h-131-97 anti-TNFR1 dAb
EVQLLESGGGLIQPGGSLRLSCAASGFTFAHETMVWVREAPGKGLEWVSHIDRVGQDTYYADSVKGRFTISRDNSKNTLYLQMNSLRAEDTAVYYCAVLPKRGPWFDYRGQGTLVTVSS

SEQ ID NO: 388 - protein, 119 aa, Artificial Sequence
  Tar2h-131-99 anti-TNFR1 dAb
EVQLLESGGGLIHPGGTLRLSCAASGFTFAHETMVWVRQAPGKGLEWVSHIDRVGQDPYYADSVKGRFTISRDNSKNTLYLQMNSLRAEDTAVYYCARLPKRGPWFDYRGQGTLVTVSS

SEQ ID NO: 389 - protein, 119 aa, Artificial Sequence
  Tar2h-131-100 anti-TNFR1 dAb
EVQLLESGGGLIQPGGSLRLSCAASGFTFAHETMVWVRQAPGKGLEWVSHIDRVGQDPYYADSVKGRFTISRDNSKNTLYLQMNSLRAEDTAVYYCARLPKRGPWFDYRGQGTQVTVSS

SEQ ID NO: 390 - protein, 119 aa, Artificial Sequence; identical to SEQ ID NO: 375
  Tar2h-131-101 anti-TNFR1 dAb

SEQ ID NO: 391 - protein, 119 aa, Artificial Sequence
  Tar2h-131-102 anti-TNFR1 dAb
EVQLLESGGGLVQPGGSLRLSCAASGFTFAHETMVWVRQAPGKGLEWVSHIDRVGQDTYYADSVEGRFTISRDNSKNTLYLQMNSLRAEDTAVYYCAVLPKRGPWFDYWGQGTLVTVSS

SEQ ID NO: 392 - protein, 119 aa, Artificial Sequence
  Tar2h-131-103 anti-TNFR1 dAb
EVQLLESGGGLVQPGGSLRLSCAASGFTFAHETMVWVRQAPGKGLEWVSHIDRVGQDPYYADSVKGRFTISRDNSKNTLYLQMNSLRAEDTAVYYCALLPKRGPWFDYWGQGTLVTVSS

SEQ ID NO: 393 - protein, 119 aa, Artificial Sequence
  Tar2h-131-104 anti-TNFR1 dAb
EVQLLESGGGLIQPGGSLRLSCAASGFTFAHETMVWVRQAPGKDLEWVSHIDRDGQDTYYADSVKGRFSISRDNSKNTLYLQMNSLRAEDTAVYYCARLPKRGPWFDYRGQGTLVTVSS

SEQ ID NO: 394 - protein, 119 aa, Artificial Sequence
  Tar2h-131-105 anti-TNFR1 dAb
EVQLLESGGGLIQPGGSLRLSCAASGFTFAHETMVWVRQAPGKGLEWVSHIDRVGQDTYYADSVKGRFTTSRDNSKNTLYLQMNSLRAEDTAVYYCARLPKRGPWFDYRGQGTLVTVSS

SEQ ID NO: 395 - protein, 119 aa, Artificial Sequence
  Tar2h-131-106 anti-TNFR1 dAb
EVQLLESGGGLIQPGGSLRLSCAASGFTFAHETMVWVRQAPGKGLEWVSHIDRDGQDTYYADSVMGRFTVSRDNSKNTLYLQMNSLRAEDTAVYYCAIIPKRGPWFDYRGQGTLVTVSS

SEQ ID NO: 396 - protein, 119 aa, Artificial Sequence
  Tar2h-131-107 anti-TNFR1 dAb
EVQLLESGGGLIQPGGSLRLSCAASGFTFAHETMVWVRQAPGKDLEWVSHIDRVGQDTYYADSVEGRFTISRDNSKNTLYLQMNSLRAEDTAVYYCAVLPKRGPWFDYRGQGTLVTVSS

SEQ ID NO: 397 - protein, 119 aa, Artificial Sequence
  Tar2h-131-108 anti-TNFR1 dAb
EVQLLESGGGLIQPGGSLRLSCAASGFTFAHETMVWVRQAPGKGLEWVSHTDRVGQDTYYADSVKGRFTISRDNSRNTLYLQMNSLRAEDTAVYYCAVLPKRGPWFDYRGQGTLVTVSS

SEQ ID NO: 398 - protein, 119 aa, Artificial Sequence
  Tar2h-131-109 anti-TNFR1 dAb
EVQLLESGGGLIQPGGTLRLSCAASGFTFALETMVWVRQAPGKGLEWVSHIDRVGQDTYYADSVKGRFTTSRDNSRNTLYLQMNSLRAEDTAVYYCARLPKRGPWFDYRGQGTLVTVSS

SEQ ID NO: 399 - protein, 119 aa, Artificial Sequence
  Tar2h-131-110 anti-TNFR1 dAb
EVQLLESGGGLIQPGGSLRLSCAASGFTFAHETMVWVRQAPGKGLEWVSHIDRVGQDTYYADSVKGRFTISRDNSKNTLYLQMNSLRAEDTAVYYCAVIPKRGPWFDYRGQGTLVTVSS

SEQ ID NO: 400 - protein, 119 aa, Artificial Sequence
  Tar2h-131-111 anti-TNFR1 dAb
EVQLLESGGGLIQPGGSLRLSCAASGFTFAHETMVWVRQAPGKGLEWVSHIDRVGQDTYYADSVKGRFTISRDNSKNTLYLQMNSLRAEDTAVYYCAVLPKRGPWFDYRGQGTQVTVSS

SEQ ID NO: 401 - protein, 119 aa, Artificial Sequence
  Tar2h-131-112 anti-TNFR1 dAb
EVQLLESGGGLIQPGGSLRLSCAASGFTFAHETMVWVRQAPGKGIEWVSHIDRVGQDTYYADSVKGRFTISRDNSKNTLYLQMNSLRAEDTAVYYCAVLPKRGPWFDYRGQGTLVTVSS

SEQ ID NO: 402 - protein, 119 aa, Artificial Sequence
  Tar2h-131-113 anti-TNFR1 dAb
EVQLLESGGGLVQPGGSLRLSCAASGFTFAHDTMVWVRQAPGKGLEWVSHIDRVGQDTYYADSVEGRFTISRDNSKNTLYLQMNSLRAEDTAVYYCAVLPKRGPWFDYWGQGTLVTVSS

SEQ ID NO: 403 - protein, 119 aa, Artificial Sequence
  Tar2h-131-114 anti-TNFR1 dAb
EVQLLESGGGLVQPGGSLRLSCAASGFTFAHDVMVWVRQAPGKGLEWVSHIDRVGQDTYYADSVEGRFTISRDNSKNTLYLQMNSLRAEDTAVYYCAVLPKRGPWFDYWGQGTLVTVSS

SEQ ID NO: 404 - protein, 119 aa, Artificial Sequence
  Tar2h-131-115 anti-TNFR1 dAb
EVQLLESGGGLVQPGGSLRLSCAASGFTFAHETMVWVRQAPGKGLEWVSHIDRVGQDPYYTDSVEDRFTISRDNSKNTLYLQMNSLRAEDTAVYYCAVLPKRGPWFDYWGQGTLVTVSS

SEQ ID NO: 405 - protein, 119 aa, Artificial Sequence
  Tar2h-131-116 anti-TNFR1 dAb
EVQLLESGGGLVQPGGSLRLSCAASGFTFAHETMVWVRQAPGKGLEWVSHIDRVGQDTYYADSVEGRFTISRDNSKNTLYLQMNSLRAEDTAVYYCALLPKRGPWFDYWGQGTLVTVSS

SEQ ID NO: 406 - protein, 119 aa, Artificial Sequence
  Tar2h-131-117 anti-TNFR1 dAb
EVQLLESGGGLVQPGGSLRLSCAASGFTFAHETMVWVRQAPGKGLEWVSHIDRVGQDPYYADSVEGRFTISRDNSKNTLYLQMNSLRAEDTAVYYCAVLPKRGPWFDYWGQGTLVTVSS

SEQ ID NO: 407 - protein, 119 aa, Artificial Sequence
  Tar2h-131-120 anti-TNFR1 dAb
EVQLLESGGGLIQPGGSLRLSCAASGFTFNKETMVWVRQAPGKGLEWVSHIDRVGQDTYYADSVKGRFTISRDNSKNTLYLQMNSLRAEDTAVYYCALLPKRGPWFDYRGQGTLVTVSS

SEQ ID NO: 408 - protein, 119 aa, Artificial Sequence
  Tar2h-131-121 anti-TNFR1 dAb
EVQLLESGGGLIQPGGSLRLSCAASGFTFNTETMVWVRRAPGKGLEWVSHIDRVGQDTYYADSVKGRFTISRDNSKNTLYLQMNSLRAEDTAVYYCALLPKRGPWFDYRGQGTLVTVSS

SEQ ID NO: 409 - protein, 119 aa, Artificial Sequence
  Tar2h-131-122 anti-TNFR1 dAb
EVQLLESGGGLIQPGGSLRLSCAASGFTFTKETMVWVRQAPGKGLEWVSHIDRVGQDTYYADSVKGRFTISRDNSKNTLYLQMNSLRAEDTAVYYCALLPKRGPWFDYRGQGTLVTVSS

SEQ ID NO: 410 - protein, 119 aa, Artificial Sequence
  Tar2h-131-123 anti-TNFR1 dAb
EVQLLESGGGLIQPGGSLRLSCAASGFTFAHETMVWVRQAPGKGLEWVSHIDGGGVDTYYADPVKGRFTISRDNSKNTLYLQMNSLRAEDTAVYYCALLPKRGPWFDYRGQGTLVTVSS

SEQ ID NO: 411 - protein, 119 aa, Artificial Sequence
  Tar2h-131-124 anti-TNFR1 dAb
EVQLLESGGGLIQPGGSLRLSCAASGFTFAHETMVWVRQAPGKGLEWVSHIDGGGRDTYYADPVKGRFTISRDNSKNTLYLQMNSLRAEDTAVYYCALLPKRGPWFDYRGQGTLVTVSS

SEQ ID NO: 412 - protein, 119 aa, Artificial Sequence; identical to SEQ ID NO: 410
  Tar2h-131-125 anti-TNFR1 dAb

SEQ ID NO: 413 - protein, 119 aa, Artificial Sequence
  Tar2h-131-126 anti-TNFR1 dAb
EVQLLESGGGLIQPGGSLRLSCAASGFTFNNQVMVWVRQAPGKGLEWVSHIDRVGQDTYYADSVKGRFTISRDNSKNTLYLQMNSLRAEDTAVYYCALLPKRGPWFDYRGQGTLVTVSS

SEQ ID NO: 414 - protein, 119 aa, Artificial Sequence
  Tar2h-131-127 anti-TNFR1 dAb
EVQLLESGGGLIQPGGSLRLSCAASGFTFAHETMVWVRQAPGKGLEWVSHIDGGGLDTYYADPVKGRFTISRDNSKNTLYLQMNSLRAEDTAVYYCALLPKRGPWFDYRGQGTLVTVSS

SEQ ID NO: 415 - protein, 119 aa, Artificial Sequence
  Tar2h-131-128 anti-TNFR1 dAb
EVQLLESGGGLIQPGGSLRLSCAASGFTFAHETMVWVRQAPGKGLEWVSHIDAVGSDTYYADPVKGRFTISRDNSKNTLYLQMNSLRAEDTAVYYCALLPKRGPWFDYRGQGTLVTVSS

SEQ ID NO: 416 - protein, 119 aa, Artificial Sequence
  Tar2h-131-129 anti-TNFR1 dAb
EVQLLESGGGLIQPGGSLRLSCAASGFTFAHETMVWVRQAPGKGLEWVSHIDRVGQDTYYADSVKGRFTISRDNSKNTLYLQMNSLRAEDTAVYYCALLPKRGPWFDYRGQGTLVTVSS

SEQ ID NO: 417 - protein, 119 aa, Artificial Sequence
  Tar2h-131-130 anti-TNFR1 dAb
EVQLLESGGGLIQPGGSLRLSCAASGFTFGNEVMVWVRQAPGKGLEWVSHIDRVGQDTYYADSVKGRFTISRDNSKNTLYLQMNSLRAEDTAVYYCALLPKRGPWFDYRGQGTLVTVSG

SEQ ID NO: 418 - protein, 119 aa, Artificial Sequence
  Tar2h-131-131 anti-TNFR1 dAb
EVQLLESGGGLIQPGGSLRLSCAASGFTFNNQTMVWVRQAPGKGLEWVSHIDRVGQDTYYADSVKGRFTISRDNSKNTLYLQMNSLRAEDTAVYYCALLPKRGPWFDYRGQGTLVTVSS

SEQ ID NO: 419 - protein, 119 aa, Artificial Sequence
  Tar2h-131-132 anti-TNFR1 dAb
EVQLLESGGGLIQPGGSLRLSCAASGFTFDNTTMVWVRQAPGKGLEWVSHIDRVGQDTYYADSVKGRFTISRDNSKNTLYLQMNSLRAEDTAVYYCALLPKRGPWFDYRGQGTLVTVSS

SEQ ID NO: 420 - protein, 119 aa, Artificial Sequence
  Tar2h-131-136 anti-TNFR1 dAb
EVQLLESGGGLVQPGGSLRLSCAASGFTFAHETMVWVRQAPGKGLEWVSHIDRVGQDPYYADSVEGRFTISRDNSKNTLYLQMNSLRAEDTAVYYCALLPKRGPWFDYWGQGTLVTVSS

SEQ ID NO: 421 - protein, 119 aa, Artificial Sequence; identical to SEQ ID NO: 410
  Tar2h-131-151 anti-TNFR1 dAb

SEQ ID NO: 422 - protein, 119 aa, Artificial Sequence
  Tar2h-131-180 anti-TNFR1 dAb
EVQLLESGGGLIQPGGSLRLSCAASGFTFAHETMVWVRQAPGKGLEWVSHIDRVGQDPYYADSVEGRFTISRDNSKNTLYLQMNSLRAEDTAVYYCAVLPKRGPWFDYRGQGTLVTVSS

SEQ ID NO: 423 - protein, 119 aa, Artificial Sequence
  Tar2h-131-181 anti-TNFR1 dAb
EVQLLESGGGLIQPGGSLRLSCAASGFTFAHETMVWVRQAPGKGLEWVSHIDRVGQDPYYADSVEGRFTISRDNSKNTLYLQMNSLRAEDTAVYYCALLPKRGPWFDYRGQGTLVTVSS

SEQ ID NO: 424 - protein, 119 aa, Artificial Sequence
  Tar2h-131-182 anti-TNFR1 dAb
EVQLLESGGGLIQPGGSLRLSCAASGFTFAHETMVWVRQAPGKGLEWVSHIDRVGQDPYYADSVEGRFTISRDNSKNTLYLQMNSLRAEDTAVYYCAVLPKRGPWFDYWGQGTLVTVSS

SEQ ID NO: 425 - protein, 119 aa, Artificial Sequence; identical to SEQ ID NO: 424
  Tar2h-131-183 anti-TNFR1 dAb

SEQ ID NO: 426 - protein, 119 aa, Artificial Sequence
  Tar2h-131-184 anti-TNFR1 dAb
EVQLLESGGGLIQPGGSLRLSCAASGFTFAHETMVWVRQAPGKGLEWVSHIDRVGQDPYYADSVEGRFTISRDNSKNTLYLQMNSLRAEDTAVYYCALLPKRGPWFDYWGQGTLVTVSS

SEQ ID NO: 427 - protein, 119 aa, Artificial Sequence
  Tar2h-131-185 anti-TNFR1 dAb
EVQLLESGGGLVQPGGSLRLSCAASGFTFAHETMVWVRQAPGKGLEWVSHIDRVGQDPYYADSVEGRFTISRDNSKNTLYLQMNSLRAEDTAVYYCALLPKRGPWFDYRGQGTLVTVSS

SEQ ID NO: 428 - protein, 119 aa, Artificial Sequence
  Tar2h-131-188 anti-TNFR1 dAb
EVQLLESGGGLIQPGGSLRLSCAASGFTFAHETMVWVRQAPGKGLEWVSHIDGGGVDTYYADPVKGRFTISRDNSKNTLYLQMNSLRAEDTAVYYCALLPKRGPWFDYWGQGTLVTVSS

SEQ ID NO: 429 - protein, 119 aa, Artificial Sequence
  Tar2h-131-189 anti-TNFR1 dAb
EVQLLESGGGLVQPGGSLRLSCAASGFTFAHETMVWVRQAPGKGLEWVSHIDGGGVDTYYADPVKGRFTISRDNSKNTLYLQMNSLRAEDTAVYYCALLPKRGPWFDYWGQGTLVTVSS

SEQ ID NO: 430 - protein, 119 aa, Artificial Sequence
  Tar2h-131-190 anti-TNFR1 dAb
EVQLLESGGGLIQPGGSLRLSCAASGFTFAHETMVWVRQAPGKGLEWVSHIDGGGVDTYYADPVKGRFTISRDNSKNTLYLQMNSLRAEDTAVYYCAVLPKRGPWFDYRGQGTLVTVSS

SEQ ID NO: 431 - protein, 119 aa, Artificial Sequence
  Tar2h-131-191 anti-TNFR1 dAb
EVQLLESGGGLVQPGGSLRLSCAASGFTFAHETMVWVRQAPGKGLEWVSHIDGGGVDTYYADPVKGRFTISRDNSKNTLYLQMNSLRAEDTAVYYCAVLPKRGPWFDYRGQGTLVTVSS

SEQ ID NO: 432 - protein, 119 aa, Artificial Sequence
  Tar2h-131-192 anti-TNFR1 dAb
EVQLLESGGGLIQPGGSLRLSCAASGFTFAHETMVWVRQAPGKGLEWVSHIDGGGVDTYYADPVKGRFTISRDNSKNTLYLQMNSLRAEDTAVYYCAVLPKRGPWFDYWGQGTLVTVSS

SEQ ID NO: 433 - protein, 119 aa, Artificial Sequence
  Tar2h-131-193 anti-TNFR1 dAb
EVQLLESGGGLVQPGGSLRLSCAASGFTFAHETMVWVRQAPGKGLEWVSHIDGGGVDTYYADPVKGRFTISRDNSKNTLYLQMNSLRAEDTAVYYCAVLPKRGPWFDYWGQGTLVTVSS

SEQ ID NO: 434 - protein, 119 aa, Artificial Sequence
  Tar2h-131-194 anti-TNFR1 dAb
EVQLLESGGGLVQPGGSLRLSCAASGFTFAHETMVWVRQAPGKGLEWVSHIPPVGQDPFYADSVKGRFTISRDNSKNTLYLQMNSLRAEDTAVYYCAVLPKRGPWFDYWGQGTLVTVSS

SEQ ID NO: 435 - protein, 119 aa, Artificial Sequence
  Tar2h-131-195 anti-TNFR1 dAb
EVQLLESGGGLIQPGGSLRLSCAASGFTFAHETMVWVRQAPGKGLEWVSHIPPVGQDPFYADSVKGRFTISRDNSKNTLYLQMNSLRAEDTAVYYCALLPKRGPWFDYWGQGTLVTVSS

SEQ ID NO: 436 - protein, 119 aa, Artificial Sequence
  Tar2h-131-196 anti-TNFR1 dAb
EVQLLESGGGLIQPGGSLRLSCAASGFTFAHETMVWVRQAPGKGLEWVSHIPPVGQDPFYADSVKGRFTISRDNSKNTLYLQMNSLRAEDTAVYYCAVLPKRGPWFDYWGQGTLVTVSS

SEQ ID NO: 437 - protein, 119 aa, Artificial Sequence
  Tar2h-131-197 anti-TNFR1 dAb
EVQLLESGGGLIQPGGSLRLSCAASGFTFAHETMVWVRQAPGKGLEWVSHIDGGGVDTYYADPVKGRFTISRDNSKNSLYLQMNSLRAEDTAVYYCALLPKRGPWFDYWGQGTLVTVSS

SEQ ID NO: 438 - protein, 119 aa, Artificial Sequence
  Tar2h-131-198 anti-TNFR1 dAb
EVQLLESGGGLVQPGGSLRLSCAASGFTFAHETMVWVRQAPGKGLEWVSHIPPVGQDPFYADSVKGRFTISRDNSKNSLYLQMNSLRAEDTAVYYCALLPKRGPWFDYWGQGTLVTVSS

SEQ ID NO: 439 - protein, 119 aa, Artificial Sequence
  Tar2h-131-500 anti-TNFR1 dAb
EVQLLESGGGLVQPGGSLRLSCAASGFTFHDQHMVWVRQAPGKGLEWVSHIDRVGQDTYYADSVKGRFTISRDNSKNTLYLQMNSLRAEDTAVYYCALLPKRGPWFDYWGQGTLVTVSS

SEQ ID NO: 440 - protein, 119 aa, Artificial Sequence
  Tar2h-131-501 anti-TNFR1 dAb
EVQLLESGGGLVQPGGSLRLSCAASGFTFANNIMVWVRQAPGKGLEWVSHIDRVGQDTYYADSVKGRFTISRDNSKNTLYLQMNNLRAEDTAVYYCALLPKRGPWFDYWGQGTLVTVSS

SEQ ID NO: 441 - protein, 119 aa, Artificial Sequence
  Tar2h-131-502 anti-TNFR1 dAb
EVQLLESGGGLVQPGGSLRLSCAASGFSFKNKTMVWVRQAQGKGLEWVSHIDRVGQDTYYADSVKGRFTISRDNSKNTLYLQMNSLRAEDTAVYYCALLPKRGPWFDYWGQGTLVTVSS

SEQ ID NO: 442 - protein, 119 aa, Artificial Sequence
  Tar2h-131-503 anti-TNFR1 dAb
EVQLLESGGGLVQPGGSLRLSCAASGFTFNKHTMVWVRQAPGKGLEWVSHIDRVGQDTYYADSVKGRFTISRDNSKNTLYLQMNSLRAEDTAVYYCALLPKRGPWFDYWGQGTLVTVSS

SEQ ID NO: 443 - protein, 119 aa, Artificial Sequence
  Tar2h-131-504 anti-TNFR1 dAb
EVQLLESGGGLVQPGGSLRLSCAASGFTFNNETMVWVRQAPGKGLEWVSHIDRVGQDTYYADSVKGRFTISRDNSKNTLYLQMNSLRAEDTAVYYCALLPKRGPWFDYWGQGTLVTVSS

SEQ ID NO: 444 - protein, 119 aa, Artificial Sequence
  Tar2h-131-505 anti-TNFR1 dAb
EVQLLESGGGLVQPGGSLRLSCAASGFTFAHETMVWVRQAPGKGLEWVSHIDGRGGGTYYTDSVKGRFTTSRDNSKNTLYLQMNSLRAEDTAVYYCALLPKRGPWFDYWGQGTLVTVSS

SEQ ID NO: 445 - protein, 119 aa, Artificial Sequence
  Tar2h-131-506 anti-TNFR1 dAb
EVQLLESGGGLVQPGGSLRLSCAASGFTFAHETMVWVRQAPGKGLEWVSHIDQQGEGTYYTDSVKGRFTISRDNSKNTLYLQMNSLRAEDTAVYYCALLPKRGPWFDYWGQGTLVTVSS

SEQ ID NO: 446 - protein, 119 aa, Artificial Sequence
  Tar2h-131-507 anti-TNFR1 dAb
EVQLLESGGGLVQPGGSLRLSCAASGFTFAHETMVWVRQAPGKGLEWVSHIDGGGGGTYYADSVKGRFTISRDNSKNTLYLQMNSLRAEDTAVYYCALLPKRGPWFDYWGQGTLVTVSS

SEQ ID NO: 447 - protein, 119 aa, Artificial Sequence
  Tar2h-131-508 anti-TNFR1 dAb
EVQLLESGGGLVQPGGSLRLSCAASGFTFAHETMVWVRQAPGKGLEWVSHIDGGGLGTYYADSVKGRFTISRDNSKNTLYLQMNSLRAEDTAVYYCALLPKRGPWFDYWGQGTLVTVSS

SEQ ID NO: 448 - protein, 119 aa, Artificial Sequence
  Tar2h-131-509 anti-TNFR1 dAb
EVQLLESGGGLVQPGGSLRLSCAASGFTFAHETMVWVRQAPGKGLEWVSHIDRVGQDTYYADSVKGRFTISRDNSKNTLYLQMNSLRAEDTAVYYCARLPKRGPWFDYWGQGTLVTVSS

SEQ ID NO: 449 - protein, 119 aa, Artificial Sequence
  Tar2h-131-510 anti-TNFR1 dAb
EVQLLESGGGLVQPGGSLRLSCAASGFTFNNKTMVWVRQAPGKGLEWVSHIDGRGERTYYADSVKGRFTISRDNSKNTLYLQMNSLRAEDTAVYYCALLPKRGPWFDYWGQGTLVTVSS

SEQ ID NO: 450 - protein, 119 aa, Artificial Sequence; identical to SEQ ID NO: 60
  Tar2h-131-511 anti-TNFR1 dAb

SEQ ID NO: 451 - protein, 119 aa, Artificial Sequence
  Tar2h-131-512 anti-TNFR1 dAb
EVQLLESGGGLVQPGGSLRLSCAASGFTFAHETMVWVRQAPGRGLEWVSHIDRVGQDTYYADSVKGRFTISRDNSKNTLYLQMNSLRAEDTAVYYCALLPKRGPWFDYWGQGTLVTVSS

SEQ ID NO: 452 - protein, 119 aa, Artificial Sequence
  Tar2h-131-513 anti-TNFR1 dAb
EVQLLESGGGLVQPGGSLRLSCAASGFTFAHETMVWVRQAPGKGLEWVSHIDRVGQDTYYADSVKGRFTISRDNSKNTLYLQMNSLRAEDTAVYYCARLPRRGPWFDYWGQGTLVTVSS

SEQ ID NO: 453 - protein, 119 aa, Artificial Sequence
  Tar2h-131-514 anti-TNFR1 dAb
  VARIANT (4)...(4): Xaa = any amino acid
EVQXLESGGGLVQPGGSLRLSCAASGFTFAHETMVWVRQAPGKGLEWVSHIDRVGQDTYYADSVRGRFTISRDNSKNTLYLQMNSLRAEDTAVYYCALLPKRGPWFDYWGQGTLVTVSS

SEQ ID NO: 454 - protein, 119 aa, Artificial Sequence
  Tar2h-131-515 anti-TNFR1 dAb
EVQLLESGGGLVQPGGSLRLSCAASGFTFAHETMVWVRQAPGKGLEWVSHISDDGNSTYYADSVKGRFTISRDNSKNTLYLQMNSLRAEDTAVYYCARLPKRGPWFDYWGQGTLVTVSS

SEQ ID NO: 455 - protein, 119 aa, Artificial Sequence
  Tar2h-131-516 anti-TNFR1 dAb
EVQLLESGGGLVQPGGSLRLSCAASGFTFAHEAMVWVRQAPGKGLEWVSHIDGGGESTYYADSVKGRFTISRDNSKNTLYLQMNSLRAEDTAVYYCARLPPPGPWFDYWGQGTLVTVSS

SEQ ID NO: 456 - protein, 119 aa, Artificial Sequence
  Tar2h-131-517 anti-TNFR1 dAb
EVQLLESGGGLVQPGGSLRLSCAASGFTFHNKDMVWVRQAPGKGLEWVSHIDGGGESTYYADSVKGRFTISRDNSKNTLYLQMNSLRAEDTAVYYCARLPLLLPWFDYWGQGTLVTVSS

SEQ ID NO: 457 - protein, 119 aa, Artificial Sequence
  Tar2h-131-518 anti-TNFR1 dAb
EVQLLESGGGLVQPGGSLRLSCAASGFTFAMRTMVWVRQAPGKGLEWVSHIDGGGESTYYADSVKGRFTISRDNSKNTLYLQMNSLRAEDTAVYYCARLPKRGPWFDYWGQGTLVTVSS

SEQ ID NO: 458 - protein, 119 aa, Artificial Sequence
  Tar2h-131-519 anti-TNFR1 dAb
EVQLLESGGGLVQPGGSLRLSCAASGFTFAHETMVWVRQAPGKGLEWVSHIDGGGESTYYADSVKGRFTISRDNSKNTLYLQMNSLRAEDTAVYYCARLPKRGPWFDYWGQGTLVTVSS

SEQ ID NO: 459 - protein, 119 aa, Artificial Sequence
  Tar2h-131-520 anti-TNFR1 dAb
EVQLLESGGGLVQPGGSLRLSCAASGFTFAHETMVWVRQAPGKGLEWVSHIDGGGLVTYYTDSVKGRFTISRDNSKNTLYLQMNSLRAEDTAVYYCALLPKRGPWFDYWGQGTLVTVSS

SEQ ID NO: 460 - protein, 119 aa, Artificial Sequence
  Tar2h-131-521 anti-TNFR1 dAb
EVQLLESGGGLVQPGGSLRLSCAASGFTFNNTTMVWVRQAPGKGLEWVSHIDGVGGDTYYADPVKGRFTISRDNSKNTLYLQMNSLRAEDTAVYYCALLPKRGPWFDYWGQGTLVTVSS

SEQ ID NO: 461 - protein, 119 aa, Artificial Sequence
  Tar2h-131-522 anti-TNFR1 dAb
EVQLLESGGGLVQPGGSLRLSCAASGFTFANKTMVWVRQAPGKGLEWVSHIDGLGLVTYYADSVEGRFTISRDNSKNTLYLQMNSLRAEDTAVYYCALLPKRGPWFDYWGQGTLVTVSS

SEQ ID NO: 462 - protein, 119 aa, Artificial Sequence
  Tar2h-131-523 anti-TNFR1 dAb
EVQLLESGGGLVQPGGSLRLSCAASGFTFNTTNMVWVRQAPGKGLEWVSEIRVGGGDTYYADSVKGRFTISRDNSKNTLYLQMNSLRAEDTAVYYCALLPKRGPWFDYWGQGTLVTVSS

SEQ ID NO: 463 - protein, 119 aa, Artificial Sequence
  Tar2h-131-524 anti-TNFR1 dAb
EVQLLESGGGLVQPGGSLRLSCAASGFTFKNKTMVWVRQAPGKGLEWVSHIDQEGEGTYYADSVKGRFTISRDNSKNTLYLQMNSLRAEDTAVYYCALLPKRGPWFDYRGQGTLVTVSS

SEQ ID NO: 464 - protein, 119 aa, Artificial Sequence
  Tar2h-131-525 anti-TNFR1 dAb
EVQLLESGGGLVQPGGSLRLSCAASGFTFNNTTMVWVRQAPGKGLEWVSHIDGEGSVTYYADSVKGRFTISRDNSKNTLYLQMNSLRAEDTAVYYCALLPKRGPWFDYWGQGTLVTVSS

SEQ ID NO: 465 - protein, 119 aa, Artificial Sequence
  Tar2h-131-526 anti-TNFR1 dAb
EVQLLESGGGLVQPGGSLRLSCAASGFTFENKTMVWVRQAPGKGLEWVSHIDATGTITYYADSVKGRFTISRDNSKNTLYLQMNSLRAEDTAVYYCALLPKRGPWFDYRGQGTLVTVSS

SEQ ID NO: 466 - protein, 119 aa, Artificial Sequence
  Tar2h-131-527 anti-TNFR1 dAb
EVQLLESGGGLVQPGGSLRLSCAASGFTFNKKTMVWVRQAPGKGLEWVSHIDGKGQATYYADSVKGRFTISRDNSKNTLYLQMNSLRAEDTAVYYCALLPKRGPWFDYWGQGTLVTVSS

SEQ ID NO: 467 - protein, 119 aa, Artificial Sequence
  Tar2h-131-528 anti-TNFR1 dAb
  VARIANT (4)...(4): Xaa = any amino acid
EVQXLESGGGLVQPGGSLRLSCAASGFTFAHETMVWVRQAPGKGLEWVSHIDRVGQDTYYADSVEGRFTISRDNSKNTLYLQMNSLRAEDTAVYYCALLPKRGPWFDYWGQGTLVTVSS

SEQ ID NO: 468 - protein, 119 aa, Artificial Sequence
  Tar2h-131-529 anti-TNFR1 dAb
EVQLLESGGGLVQPGGSLRLSCAASGFTFAHETMVWVRQAPGKGLEWVSHIDGGGESTYYADSVEGRFTISRDNSKNTLYLQMNSLRAEDTAVYYCARLPKRGPWFDYWGQGTLVTVSS

SEQ ID NO: 469 - protein, 119 aa, Artificial Sequence
  Tar2h-131-530 anti-TNFR1 dAb
EVQLLESGGGLVQPGGSLRLSCAASGFTFAHETMVWVRQAPGKGLEWVSHIDGGGESTYYADPVEGRFTISRDNSKNTLYLQMNSLRAEDTAVYYCARLPKRGPWFDYWGQGTLVTVSS

SEQ ID NO: 470 - protein, 119 aa, Artificial Sequence
  Tar2h-131-531 anti-TNFR1 dAb
EVQLLESGGGLVQPGGSLRLSCAASGFTFENKTMVWVRQAPGKGLEWVSHIDATGTITYYADSVEGRFTISRDNSKNTLYLQMNSLRAEDTAVYYCALLPKRGPWFDYRGQGTLVTVSS

SEQ ID NO: 471 - protein, 119 aa, Artificial Sequence
  Tar2h-131-532 anti-TNFR1 dAb
EVQLLESGGGLVQPGGSLRLSCAASGFTFNKKTMVWVRQAPGKGLEWVSHIDGKGQATYYADSVEGRFTISRDNSKNTLYLQMNSLRAEDTAVYYCALLPKRGPWFDYWGQGTLVTVSS

SEQ ID NO: 472 - protein, 119 aa, Artificial Sequence
  Tar2h-131-533 anti-TNFR1 dAb
EVQLLESGGGLVQPGGSLRLSCAASGFTFNKKTMVWVRQAPGKGLEWVSHIDGKGQDPFYTDSVKGRFTISRDNSKNTLYLQMNSLRAEDTAVYYCALLPKRGPWFDYWGQGTLVTVSS

SEQ ID NO: 473 - protein, 119 aa, Artificial Sequence
  Tar2h-131-534 anti-TNFR1 dAb
EVQLLESGGGLVQPGGSLRLSCAASGFTFAHETMVWVRQAPGKGLEWVSHIDGGGLVTYYTDPVKGRFTISRDNSKNTLYLQMNSLRAEDTAVYYCALLPKRGPWFDYWGQGTLVTVSS

SEQ ID NO: 474 - protein, 119 aa, Artificial Sequence
  Tar2h-131-535 anti-TNFR1 dAb
EVQLLESGGGLVQPGGSLRLSCAASGFTFAHETMVWVRQAPGKGLEWVSHIDGGGLVTYYTDSVEGRFTISRDNSKNTLYLQMNSLRAEDTAVYYCALLPKRGPWFDYWGQGTLVTVSS

SEQ ID NO: 475 - protein, 119 aa, Artificial Sequence
  Tar2h-131-536 anti-TNFR1 dAb
EVQLLESGGGLVQPGGSLRLSCAASGFTFAHETMVWVRQAPGKGLEWVSHIDGGGLVTYYTDPVEGRFTISRDNSKNTLYLQMNSLRAEDTAVYYCALLPKRGPWFDYWGQGTLVTVSS

SEQ ID NO: 476 - protein, 119 aa, Artificial Sequence
  Tar2h-131-537 anti-TNFR1 dAb
EVQLLESGGGLVQPGGSLRLSCAASGFTFAHETMVWVRQAPGKGLEWVSHIPPVGQDPFYADSVEGRFTISRDNSKNTLYLQMNSLRAEDTAVYYCALLPKRGPWFDYWGQGTLVTVSS

SEQ ID NO: 477 - protein, 119 aa, Artificial Sequence
  Tar2h-131-538 anti-TNFR1 dAb
EVQLLESGGGLVQPGGSLRLSCAASGFTFAHETMVWVRQAPGKGLEWVSHIPPVGQDPFYADPVKGRFTISRDNSKNTLYLQMNSLRAEDTAVYYCALLPKRGPWFDYWGQGTLVTVSS

SEQ ID NO: 478 - protein, 119 aa, Artificial Sequence
  Tar2h-131-539 anti-TNFR1 dAb
EVQLLESGGGLVQPGGSLRLSCAASGFTFAHETMVWVRQAPGKGLEWVSHIPPVGQDPFYTDSVKGRFTISRDNSKNTLYLQMNSLRAEDTAVYYCALLPKRGPWFDYWGQGTLVTVSS

SEQ ID NO: 479 - protein, 119 aa, Artificial Sequence
  Tar2h-131-540 anti-TNFR1 dAb
EVQLLESGGGLVQPGGSLRLSCAASGFTFAHETMVWVRQAPGKGLEWVSHIPPVGQDPFYTDSVEGRFTISRDNSKNTLYLQMNSLRAEDTAVYYCALLPKRGPWFDYWGQGTLVTVSS

SEQ ID NO: 480 - protein, 119 aa, Artificial Sequence
  Tar2h-131-541 anti-TNFR1 dAb
EVQLLESGGGLVQPGGSLRLSCAASGFTFAHETMVWVRQAPGKGLEWVSHIDGGGESTYYTDPVKGRFTISRDNSKNTLYLQMNSLRAEDTAVYYCARLPKRGPWFDYWGQGTLVTVSS

SEQ ID NO: 481 - protein, 119 aa, Artificial Sequence
  Tar2h-131-542 anti-TNFR1 dAb
EVQLLESGGGLVQPGGSLRLSCAASGFTFAHETMVWVRQAPGKGLEWVSHIDGGGESTYYTDSVEGRFTISRDNSKNTLYLQMNSLRAEDTAVYYCARLPKRGPWFDYWGQGTLVTVSS

SEQ ID NO: 482 - protein, 119 aa, Artificial Sequence
  Tar2h-131-543 anti-TNFR1 dAb
EVQLLESGGGLVQPGGSLRLSCAASGFTFAHETMVWVRQAPGKGLEWVSHIDGGGESTYYTDPVEGRFTISRDNSKNTLYLQMNSLRAEDTAVYYCARLPKRGPWFDYWGQGTLVTVSS

SEQ ID NO: 483 - protein, 119 aa, Artificial Sequence
  Tar2h-131-544 anti-TNFR1 dAb
EVQLLESGGGLVQPGGSLRLSCAASGFTFNKKTMVWVRQAPGKGLEWVSHIDGKGQATYYTDPVKGRFTISRDNSKNTLYLQMNSLRAEDTAVYYCALLPKRGPWFDYWGQGTLVTVSS

SEQ ID NO: 484 - protein, 119 aa, Artificial Sequence
  Tar2h-131-545 anti-TNFR1 dAb
EVQLLESGGGLVQPGGSLRLSCAASGFTFNKKTMVWVRQAPGKGLEWVSHIDGKGQATYYTDSVEGRFTISRDNSKNTLYLQMNSLRAEDTAVYYCALLPKRGPWFDYWGQGTLVTVSS

SEQ ID NO: 485 - protein, 119 aa, Artificial Sequence
  Tar2h-131-546 anti-TNFR1 dAb
EVQLLESGGGLVQPGGSLRLSCAASGFTFNKKTMVWVRQAPGKGLEWVSHIDGKGQATYYTDPVEGRFTISRDNSKNTLYLQMNSLRAEDTAVYYCALLPKRGPWFDYWGQGTLVTVSS

SEQ ID NO: 486 - protein, 119 aa, Artificial Sequence
  Tar2h-131-547 anti-TNFR1 dAb
EVQLLESGGGLVQPGGSLRLSCAASGFTFAHETMVWVRQAPGKGLEWVSHIPPVGQDPFYTDPVKGRFTISRDNSKNTLYLQMNSLRAEDTAVYYCALLPKRGPWFDYWGQGTLVTVSS

SEQ ID NO: 487 - protein, 119 aa, Artificial Sequence
  Tar2h-131-548 anti-TNFR1 dAb
EVQLLESGGGLVQPGGSLRLSCAASGFTFAHETMVWVRQAPGKGLEWVSHIPPVGQDPFYADPVEGRFTISRDNSKNTLYLQMNSLRAEDTAVYYCALLPKRGPWFDYWGQGTLVTVSS

SEQ ID NO: 488 - protein, 119 aa, Artificial Sequence
  Tar2h-131-549 anti-TNFR1 dAb
EVQLLESGGGLVQPGGSLRLSCAASGFTFNKKTMVWVRQAPGKGLEWVSHIDGKGQDPFYTDSVEGRFTISRDNSKNTLYLQMNSLRAEDTAVYYCALLPKRGPWFDYWGQGTLVTVSS

SEQ ID NO: 489 - protein, 119 aa, Artificial Sequence
  Tar2h-131-550 anti-TNFR1 dAb
EVQLLESGGGLVQPGGSLRLSCAASGFTFNKKTMVWVRQAPGKGLEWVSHIDGKGQDPFYADPVKGRFTISRDNSKNTLYLQMNSLRAEDTAVYYCALLPKRGPWFDYWGQGTLVTVSS

SEQ ID NO: 490 - protein, 119 aa, Artificial Sequence
  Tar2h-131-551 anti-TNFR1 dAb
EVQLLESGGGLVQPGGSLRLSCAASGFTFNKKTMVWVRQAPGKGLEWVSHIDGKGQDPFYTDPVKGRFTISRDNSKNTLYLQMNSLRAEDTAVYYCALLPKRGPWFDYWGQGTLVTVSS

SEQ ID NO: 491 - protein, 119 aa, Artificial Sequence; identical to SEQ ID NO: 488
  Tar2h-131-552 anti-TNFR1 dAb

SEQ ID NO: 492 - protein, 119 aa, Artificial Sequence
  Tar2h-131-553 anti-TNFR1 dAb
EVQLLESGGGLVQPGGSLRLSCAASGFTFNKKTMVWVRQAPGKGLEWVSHIDGKGQDPFYTDPVEGRFTISRDNSKNTLYLQMNSLRAEDTAVYYCALLPKRGPWFDYWGQGTLVTVSS

SEQ ID NO: 493 - protein, 119 aa, Artificial Sequence
  Tar2h-131-554 anti-TNFR1 dAb
EVQLLESGGGLVQPGGSLRLSCAASGFTFAHETMVWVRQAPGKGLEWVSHIPPVGQDPFYTDPVEGRFTISRDNSKNTLYLQMNSLRAEDTAVYYCALLPKRGPWFDYWGQGTLVTVSS

SEQ ID NO: 494 - protein, 119 aa, Artificial Sequence
  Tar2h-131-555 anti-TNFR1 dAb
EVQLLESGGGLVQPGGSLRLSCAASGFTFAHETMVWVRQAPGKGLEWVSHIDGGGESPYYADSVKGRFTISRDNSKNTLYLQMNSLRAEDTAVYYCARLPKRGPWFDYWGQGTLVTVSS

SEQ ID NO: 495 - protein, 119 aa, Artificial Sequence; identical to SEQ ID NO: 435
  Tar2h-131-556 anti-TNFR1 dAb

SEQ ID NO: 496 - protein, 119 aa, Artificial Sequence
  Tar2h-131-557 anti-TNFR1 dAb
EVQLLESGGGLIQPGGSLRLSCAASGFTFAHETMVWVRQAPGKGLEWVSHIPPVGQDPFYADPVKGRFTISRDNSKNTLYLQMNSLRAEDTAVYYCALLPKRGPWFDYWGQGTLVTVSS

SEQ ID NO: 497 - protein, 119 aa, Artificial Sequence
  Tar2h-131-558 anti-TNFR1 dAb
EVQLLESGGGLIQPGGSLRLSCAASGFTFAHETMVWVRQAPGKGLEWVSHIPPVGQDPFYTDSVKGRFTISRDNSKNTLYLQMNSLRAEDTAVYYCALLPKRGPWFDYWGQGTLVTVSS

SEQ ID NO: 498 - protein, 119 aa, Artificial Sequence
  Tar2h-131-559 anti-TNFR1 dAb
EVQLLESGGGLIQPGGSLRLSCAASGFTFAHETMVWVRQAPGKGLEWVSHIPPVGQDPFYTDSVEGRFTISRDNSKNTLYLQMNSLRAEDTAVYYCALLPKRGPWFDYWGQGTLVTVSS

SEQ ID NO: 499 - protein, 119 aa, Artificial Sequence
  Tar2h-131-560 anti-TNFR1 dAb
EVQLLESGGGLIQPGGSLRLSCAASGFTFAHETMVWVRQAPGKGLEWVSHIDGGGESTYYADSVEGRFTISRDNSKNTLYLQMNSLRAEDTAVYYCARLPKRGPWFDYWGQGTLVTVSS

SEQ ID NO: 500 - protein, 119 aa, Artificial Sequence
  Tar2h-131-561 anti-TNFR1 dAb
EVQLLESGGGLIQPGGSLRLSCAASGFTFAHETMVWVRQAPGKGLEWVSHIDGGGESTYYTDPVKGRFTISRDNSKNTLYLQMNSLRAEDTAVYYCARLPKRGPWFDYWGQGTLVTVSS

SEQ ID NO: 501 - protein, 119 aa, Artificial Sequence
  Tar2h-131-562 anti-TNFR1 dAb
EVQLLESGGGLIQPGGSLRLSCAASGFTFAHETMVWVRQAPGKGLEWVSHIDGGGESTYYTDSVEGRFTISRDNSKNTLYLQMNSLRAEDTAVYYCARLPKRGPWFDYWGQGTLVTVSS

SEQ ID NO: 502 - protein, 119 aa, Artificial Sequence
  Tar2h-131-563 anti-TNFR1 dAb
EVQLLESGGGLIQPGGSLRLSCAASGFTFAHETMVWVRQAPGKGLEWVSHIDGGGESTYYTDPVEGRFTISRDNSKNTLYLQMNSLRAEDTAVYYCARLPKRGPWFDYWGQGTLVTVSS

SEQ ID NO: 503 - protein, 119 aa, Artificial Sequence
  DOM1h-574' anti-TNFR1 dAb
EVQLLESGGGLVQPGGSLRLSCAASGFTFVKYSMGWVRQAPGKGLEWVSQISNTGGHTYYADSVKGRFTISRDNSKNTLYLQMNSLRAEDTAVYYCAKYTGHWEPFDYWGQGTLVTVSS

SEQ ID NO: 504 - protein, 119 aa, Artificial Sequence
  DOM1h-574-1 anti-TNFR1 dAb
EVQLLESGGGLVQPGGSLRLSCAASGFTFVKYSMGWVRQAPGKGLEWVSQISNTGGHTYYADSVKGRFTISRDNSKNTLYLQMNSLRAEDTAVYYCAKYTGRWEPYDYWGQGTLVTVSS

SEQ ID NO: 505 - protein, 119 aa, Artificial Sequence; identical to SEQ ID NO: 273
  DOM1h-574-2 anti-TNFR1 dAb

SEQ ID NO: 506 - protein, 119 aa, Artificial Sequence
  DOM1h-574-4 anti-TNFR1 dAb
EVQLLESGGGLVQPGGSLRLSCAASGFTFVKYSMGWVRQAPGKGLEWVSQISNTGGHTYYADSVKGRFTISRDNSKNTLYLQMNSLRAEDTAVYYCAKYTGRWEPFEYWGQGTLVTVSS

SEQ ID NO: 507 - protein, 119 aa, Artificial Sequence
  DOM1h-574-72 anti-TNFR1 dAb
EVQLLESGGGLVQPGGSLRLSCAASGFTFVKYSMGWVRQAPGKGLEWVSQISNTADRTYYAHSVKGRFTISRDNSKNTLYLQMNSLRAEDTAVYYCAIYTGRWVPFEYWGQGTLVTVSS

SEQ ID NO: 508 - protein, 119 aa, Artificial Sequence
  DOM1h-574-109 anti-TNFR1 dAb
EVQLLESGGGLVQPGGSLRLSCAASGFTFVKYSMGWVRQAPGKGLEWVSQISDTADRTYYAHSVKGRFTISRDNSKNTLYLQMNSLRAEDTAVYYCAIYTGRWVPFEYWGQGTLVTVSS

SEQ ID NO: 509 - protein, 119 aa, Artificial Sequence
  DOM1h-574-132 anti-TNFR1 dAb
EVQLLESGGGLVQPGGSLRLSCAASGFTFVKYSMGWVRQAPGKGLEWVSQISDTADRTYYDHSVKGRFTISRDNSKNTLYLQMNSLRAEDTAVYYCAIYTGRWRPFEYWGQGTLVTVSS

SEQ ID NO: 510 - protein, 119 aa, Artificial Sequence
  DOM1h-574-135 anti-TNFR1 dAb
EVQLLESGGGLVQPGGSLRLSCAASGFTFVKYSMGWVRQAPGKGLEWVSQISDTADRTYYTHSVKGRFTISRDNSKNTLYLQMNSLRAEDTAVYYCAIYTGRWVPFEYWGQGTLVTVSS

SEQ ID NO: 511 - protein, 119 aa, Artificial Sequence
  DOM1h-574-138 anti-TNFR1 dAb
EVQLLESGGGLVQPGGSLRLSCAASGFTFFKYSMGWVRQAPGKGLEWVSQISDTADRTYYAHSVKGRFTISRDNSKNTLYLQMNSLRAEDTAVYYCAIYTGRWAPFEYWGQGTLVTVSS

SEQ ID NO: 512 - protein, 119 aa, Artificial Sequence
  DOM1h-574-156 anti-TNFR1 dAb
EVQLLESGGGLVQPGGSLRLSCAASGFTFFKYSMGWVRQAPGKGLEWVSQISDTADRTYYAHSVKGRFTISRDNSKNTLYLQMNSLRAEDTAVYYCAIYTGRWVPFEYWGQGTLVTVSS

SEQ ID NO: 513 - protein, 119 aa, Artificial Sequence
  DOM1h-574-162 anti-TNFR1 dAb
EVQLLESGGGLVQPGGSLRLSCAASGFTFFKYSMGWVRQAPGKGLEWVSQISDTADRTYYSHSVKGRFTISRDNSKNTLYLQMNSLRAEDTAVYYCAIYTGRWVPFEYWGQGTLVTVSS

SEQ ID NO: 514 - protein, 119 aa, Artificial Sequence
  DOM1h-574-180 anti-TNFR1 dAb
EVQLLESGGGLVQPGGSLRLSCAASGFTFVKYSMGWVRQAPGKGLEWVSQISDTADRTYYAHAVKGRFTISRDNSKNTLYLQMNSLRAEDTAVYYCAIYTGRWVPFEYWGQGTLVTVSS

SEQ ID NO: 515 - protein, 119 aa, Artificial Sequence
  DOM1h-574-14 anti-TNFR1 dAb
EVQLLESGGGLVQPGGSLRLSCAASGFTFVKYSMGWVRQAPGKGLEWVSQISNTGDRTYYADSVKGRFTISRDNSKNTLYLQMNSLRAEDTAVYYCAIYTGRWEPFDYWGQGTLVTVSS

SEQ ID NO: 516 - protein, 119 aa, Artificial Sequence
  DOM1h-574-93 anti-TNFR1 dAb
EVQLLESGGGLVQPGGSLRLSCAASGFTFLKYSMGWVRQAPGKGLEWVSQISDTGDRRYYDDSVKGRFTISRDNSKNTLYLQMNSLRAEDTAVYYCAIYTGRWEPFVYWGQGTLVTVSS

SEQ ID NO: 517 - protein, 119 aa, Artificial Sequence
  DOM1h-574-123 anti-TNFR1 dAb
EVQLLESGGGLVQPGGSLRLSCAASGFTFVKYSMGWVRQAPGKGLEWVSQISNTADRRYYADAVKGRFTISRDNSKNTLYLQMNSLRAEDTAVYYCAIYTGRWEPFVYWGQGTLVTVSS

SEQ ID NO: 518 - protein, 119 aa, Artificial Sequence
  DOM1h-574-125 anti-TNFR1 dAb
EVQLLESGGGLVQPGGSLRLSCAASGFTFVKYSMGWVRQAPGKGLEWVSQIANTADRRYYADAVKGRFTISRDNSKNTLYLQMNSLRAEDTAVYYCAIYTGRWEPFVYWGQGTLVTVSS

SEQ ID NO: 519 - protein, 119 aa, Artificial Sequence
  DOM1h-574-126 anti-TNFR1 dAb
EVQLLESGGGLVQPGGSLRLSCAASGFTFVKYSMGWVRQAPGKGLEWVSQIANTGDRRYYAHAVKGRFTISRDNSKNTLYLQMNSLRAEDTAVYYCAIYTGRWEPFVYWGQGTLVTVSS

SEQ ID NO: 520 - protein, 119 aa, Artificial Sequence
  DOM1h-574-129 anti-TNFR1 dAb
EVQLLESGGGLVQPGGSLRLSCAASGFTFVKYSMGWVRQAPGKGLEWVSQIVNTGDRRYYADAVKGRFTISRDNSKNTLYLQMNSLRAEDTAVYYCAIYTGRWEPFVYWGQGTLVTVSS

SEQ ID NO: 521 - protein, 119 aa, Artificial Sequence
  DOM1h-574-133 anti-TNFR1 dAb
EVQLLESGGGLVQPGGSLRLSCAASGFTFVKYSMGWVRQAPGKGLEWVSQISDTADRTYYDHSVKGRFTISRDNSKNTLYLQMNSLRAEDTAVYYCAIYTGRWEPFVYWGQGTLVTVSS

SEQ ID NO: 522 - protein, 119 aa, Artificial Sequence
  DOM1h-574-137 anti-TNFR1 dAb
EVQLLESGGGLVQPGGSLRLSCAASGFTFVKYSMGWVRQAPGKGLEWVSQISDTADRTYYTDAVKGRFTISRDNSKNTLYLQMNSLRAEDTAVYYCAIYTGRWEPFVYWGQGTLVTVSS

SEQ ID NO: 523 - protein, 119 aa, Artificial Sequence
  DOM1h-574-160 anti-TNFR1 dAb
EVQLLESGGGLVQPGGSLRLSCAASGFTFLKYSMGWVRQAPGKGLEWVSQISDTADRTYYDHSVKGRFTISRDNSKNTLYLQMNSLRAEDTAVYYCAIYTGRWEPFVYWGQGTLVTVSS

SEQ ID NO: 524 - protein, 119 aa, Artificial Sequence
  DOM1h-574-139 anti-TNFR1 dAb
EVQLLESGGGLVQPGGSLRLSCAASGFTFLKYSMGWVRQAPGKGLEWVSQISDTADRTYYAHSVKGRFTISRDNSKNTLYLQMNSLRAEDTAVYYCAIYTGRWAPFEYWGQGTLVTVSS

SEQ ID NO: 525 - protein, 119 aa, Artificial Sequence
  DOM1h-574-155 anti-TNFR1 dAb
EVQLLESGGGLVQPGGSLRLSCAASGFTFLKYSMGWVRQAPGKGLEWVSQISDTADRTYYAHSVKGRFTISRDNSKNTLYLQMNSLRAEDTAVYYCAIYTGRWVPFEYWGQGTLVTVSS

SEQ ID NO: 526 - protein, 120 aa, Artificial Sequence
  DOM1h-509 anti-TNFR1 dAb
EVQLLESGGGLVQPGGSLRLSCAASGFTFSQYRMHWVRQAPGKSLEWVSSIDTRGSSTYYADPVKGRFTISRDNSKNTLYLQMNSLRAEDTAVYYCAKAVTMFSPFFDYWGQGTLVTVSS

SEQ ID NO: 527 - protein, 123 aa, Artificial Sequence
  DOM1h-510 anti-TNFR1 dAb
EVQLLESGGGLVQPGGSLRLSCAASGFTFADYGMRWVRQAPGKGLEWVSSITRTGRVTYYADSVKGRFTISRDNSKNTLYLQMNSLRAEDTAVYYCAKWRNRHGEYLADFDYWGQGTLVTVSS

SEQ ID NO: 528 - protein, 120 aa, Artificial Sequence
  DOM1h-543 anti-TNFR1 dAb
EVQLLESGGGLVQPGGSLRLSCAASGFTFMRYRMHWVRQAPGKGLEWVSSIDSNGSSTYYADSVKGRFTISRDNSKNTLYLQMNSLRAEDTAVYYCAKDRTERSPVFDYWGQGTLVTVSS

SEQ ID NO: 529 - protein, 119 aa, Artificial Sequence; identical to SEQ ID NO: 58
  DOM1h-549 anti-TNFR1 dAb

SEQ ID NO: 530 - protein, 119 aa, Artificial Sequence
  DOM1h-574-7 anti-TNFR1 dAb
EVQLLESGGGLVQPGGSLRLSCAASGFTFVKYSMGWVRQAPGKGLEWVSQISNTGGHTYYADSVKGRFTISRDNSKNTLYLQMNSLRAEDTAVYYCAIYTGRWEPFDYWGQGTLVTVSS

SEQ ID NO: 531 - protein, 119 aa, Artificial Sequence
  DOM1h-574-8 anti-TNFR1 dAb
EVQLLESGGGLVQPGGSLRLSCAASGFTFVKYSMGWVRQAPGKGPEWVSQISNTGGHTYYADSVKGRFTISRDNSKNTLYLQMNSLRAEDTAVYYCAIYTGRWEPFDYWGQGTLVTVSS

SEQ ID NO: 532 - protein, 119 aa, Artificial Sequence
  DOM1h-574-9 anti-TNFR1 dAb
EVQLLESGGGLVQPGGSLRLSCAASGFTFVKYSMGWVRQAPGKGLEWVSQISNTGGHTYYADSVKGRFTISRDNSKNTLYMQMNSLRAEDTAVYYCAIYTGRWEPFDYWGQGTLVTVSS

SEQ ID NO: 533 - protein, 119 aa, Artificial Sequence
  DOM1h-574-10 anti-TNFR1 dAb
EVQLLESGGGLVQPGGSLRLSCAASGFTFGKYSMGWVRQAPGKDLEWVSQISNTGGHTYYADSVKGRFTISRDNSKNTLYLQMNSLRAEDTAVYYCAIYTGRWEPFDYWGQGTLVTVSS

SEQ ID NO: 534 - protein, 119 aa, Artificial Sequence
  DOM1h-574-11 anti-TNFR1 dAb
EVQLLESGGGLVQPGGSLRLSCAASGFTFVKYSMGWVRQAPGKGLEWVSQISNTGGHTYYADSVKGRFTISRDNSKNTLYLQMNSLRAEDTAVYYCAKYTGRWEPFDHWGQGTLVTVSS

SEQ ID NO: 535 - protein, 119 aa, Artificial Sequence
  DOM1h-574-12 anti-TNFR1 dAb
EVQLLESGGGLVQPGGSLRLSCAASGFTFVKYSMGWVRQAPGKGLEWVSQISNTGDHTYYADSVKGRFTISRDNSKNTLYLQMNSLRAEDTAVYYCAKYTGRWEPFDYWGQGTLVTVSS

SEQ ID NO: 536 - protein, 119 aa, Artificial Sequence
  DOM1h-574-13 anti-TNFR1 dAb
EVQLLESGGGLVQPGGSLRLSCAASGFTFVKYSMGWVRQAPGKGLEWVSQISNTGDRTYYADSVKGRFTISRDNSKNTLYLQMNSLRAEDTAVYYCAKYTGRWEPFDYWGQGTLVTVSS

SEQ ID NO: 537 - protein, 119 aa, Artificial Sequence
  DOM1h-574-15 anti-TNFR1 dAb
EVQLLESGGGLVQPGGSLRLSCAASGFTFVKYSMGWVRQAPGKGLEWVSQISNTGDHTYYADSVKGRFTISRDNSKNTLYLQMNSLRAEDTAVYYCAIYTGRWEPFDYWGQGTLVTVSS

SEQ ID NO: 538 - protein, 119 aa, Artificial Sequence; identical to SEQ ID NO: 57
  DOM1h-574-16 anti-TNFR1 dAb

SEQ ID NO: 539 - protein, 119 aa, Artificial Sequence
  DOM1h-574-17 anti-TNFR1 dAb
EVQLLESGGGLVQPGGSLRLSCAASGFTFVKYSMGWVRQAPGKGPEWVSQISNTGDHTYYADSVKGRFTISRDNSKNTLYLQMNSLRAEDTAVYYCAIYTGRWEPFDYWGQGTLVTVSS

SEQ ID NO: 540 - protein, 119 aa, Artificial Sequence
  DOM1h-574-18 anti-TNFR1 dAb
EVQLLESGGGLVQPGGSLRLSCAASGFTFGKYSMGWVRQAPGKDLEWVSQISNTGDRTYYADSVKGRFTISRDNSKNTLYLQMNSLRAEDTAVYYCAIYTGRWEPFDYWGQGTLVTVSS

SEQ ID NO: 541 - protein, 119 aa, Artificial Sequence
  DOM1h-574-19 anti-TNFR1 dAb
EVQLLESGGGLVQPGGSLRLSCAASGFTFGKYSMGWVRQAPGKDLEWVSQISNTGDHTYYADSVKGRFTISRDNSKNTLYLQMNSLRAEDTAVYYCAIYTGRWEPFDYWGQGTLVTVSS

SEQ ID NO: 542 - protein, 119 aa, Artificial Sequence
  DOM1h-574-25 anti-TNFR1 dAb
EVQLLESGGGLVQPGGSLRLSCAASGFTFVKYSMGWVRQAPGKGLEWVSQISNTGDRTYYADSVKGRFTISRDNSKNTLYLQMNSLRAEDTAVYYCAIYTGRWEPFVYWGQGTLVTVSS

SEQ ID NO: 543 - protein, 119 aa, Artificial Sequence
  DOM1h-574-26 anti-TNFR1 dAb
EVQLLESGGGLVQPGGSLRLSCAASGFTFVKYSMGWVRQAPGKGLEWVSQISNTGDRTYYADSVKGRFTISRDNSKNTLYLQMNSLRAEDTAVYYCAIYTGRWEPFEYWGQGTLVTVSS

SEQ ID NO: 544 - protein, 119 aa, Artificial Sequence
  DOM1h-574-27 anti-TNFR1 dAb
EVQLLESGGGLVQPGGSLRLSCAASGFTFVKYSMGWVRQAPGKGLEWVSQISNTGDRTYYADSVKGRFTISRDNSKNTLYLQMNSLRAEDTAVYYCAIYTGRWKPFEYWGQGTLVTVSS

SEQ ID NO: 545 - protein, 119 aa, Artificial Sequence
  DOM1h-574-28 anti-TNFR1 dAb
EVQLLESGGGLVQPGGSLRLSCAASGFTFVKYSMGWVRQAPGKGLEWVSQISNTGDRTYYADSVKGRFTISRDNSKNTLYLQMNSLRAEDTAVYYCAIYTGRWVPFEYWGQGTLVTVSS

SEQ ID NO: 546 - protein, 119 aa, Artificial Sequence
  DOM1h-574-29 anti-TNFR1 dAb
EVQLLESGGGLVQPGGSLRLSCAASGFTFVKYSMGWVRQAPGKGLEWVSQISNTGDRTYYADSVKGRFTISRDNSKNTLYLQMNSLRAEDTAVYYCAIYTGRWRPFEYWGQGTLVTVSS

SEQ ID NO: 547 - protein, 119 aa, Artificial Sequence
  DOM1h-574-30 anti-TNFR1 dAb
EVQLLESGGGLVQPGGSLRLSCAASGFTFVKYSMGWVRQAPGKGLEWVSQIANTGDRRYYADSVKGRFTISRDNSKNTLYLQMNSLRAEDTAAYYCAIYTGRWEPFDYWGQGTLVTVSS

SEQ ID NO: 548 - protein, 119 aa, Artificial Sequence
  DOM1h-574-31 anti-TNFR1 dAb
EVQLLESGGGLVQPGGSLRLSCAASGFTFVKYSMGWVRQAPGKGLEWVSQISNTADRTYYAHSVKGRFTISRDNSKNTLYLQMNSLRAEDTAVYYCAIYTGRWEPFNYWGQGTLVTVSS

SEQ ID NO: 549 - protein, 119 aa, Artificial Sequence
  DOM1h-574-32 anti-TNFR1 dAb
EVQLLESGGGLVQPGGSLRLSCAASGFTFVKYSMGWVRQAPGKGLEWVSQISNTGDRTYYADSVKGRFTISRDNSKNTLYLQMNSLRAEDTAVYYCAIYTGRWAPFEYWGQGTLVTVSS

SEQ ID NO: 550 - protein, 119 aa, Artificial Sequence
  DOM1h-574-33 anti-TNFR1 dAb
EVQLLESGGGLVQPGGSLRLSCAASGFTFVKYSMGWVRQAPGKGLEWVSQISNTGDRTYYADSVKGRFTISRDNSKNSLYLQMNSLRAEDTAVYYCAIYTGRWVPFDNWGQGTLVTVSS

SEQ ID NO: 551 - protein, 119 aa, Artificial Sequence
  DOM1h-574-35 anti-TNFR1 dAb
EVQLLESGGGLVQPGGSLRLSCAASGFTFITYSMGWVRQAPGKGLEWVSQISNTGDRTYYADSVKGRFTISRDNSKNTLYLQMNSLRAEDTAVYYCAIYTGRWEPFQYWGQGTLVTVSS

SEQ ID NO: 552 - protein, 119 aa, Artificial Sequence
  DOM1h-574-36 anti-TNFR1 dAb
EVQLLESGGGLVQPGGSLRLSCAASGFTFGKYSMGWVRQAPGKGLEWVSQISNTGDRTYYADSVKGRFTISRDNSKNTLYLQMNSLRAEDTAVYYCAIYTGRWEPFDYWGQGTLVTVSS

SEQ ID NO: 553 - protein, 119 aa, Artificial Sequence
  DOM1h-574-37 anti-TNFR1 dAb
EVQLLESGGGLVQPGGSLRLSCAASGFTFFKYSMGWVRQAPGKGLEWVSQISNTGDRTYYADSVKGRFTISRDNSKNTLYLQMNSLRAEDTAVYYCAIYTGRWEPFDYWGQGTLVTVSS

SEQ ID NO: 554 - protein, 119 aa, Artificial Sequence
  DOM1h-574-38 anti-TNFR1 dAb
EVQLLESGGGLVQPGGSLRLSCAASGFTFVKYSMGWVRQAPGKGLEWVSQISDTGDRRYYDDSVKGRFTISRDNSKNTLYLQMNSLRAEDTAVYYCAIYTGRWEPFDYWGQGTLVTVSS

SEQ ID NO: 555 - protein, 119 aa, Artificial Sequence
  DOM1h-574-39 anti-TNFR1 dAb
EVQLLESGGGLVQPGGSLRLSCAASGFTFVKYSMGWVRQAPGKGLEWVSQISNTGDRRYYADAVKGRFTISRDNSKNTLYLQMNSLRAEDTAVYYCAIYTGRWEPFDYWGQGTLVTVSS

SEQ ID NO: 556 - protein, 119 aa, Artificial Sequence
  DOM1h-574-40 anti-TNFR1 dAb
EVQLLESGGGLVQPGGSLRLSCAASGFTFVKYSMGWVRQAPGKGLEWVSQISNTGDRTYYADSVKGRFTISRDNSKNTLYLQMNSLRAEDTAVYYCAIYTGRWEPFKYWGQGTLVTVSS

SEQ ID NO: 557 - protein, 119 aa, Artificial Sequence
  DOM1h-574-53 anti-TNFR1 dAb
EVQLLESGGGLVQPGGSLRLSCAASGFTFSKYSMGWVRQAPGKGLEWVSQISNTGERRYYADSVKGRFTISRDNPKNTLYLQMNSLRAEDTAVYYCAIYTGRWEPFEYWGQGTLVTVSS

SEQ ID NO: 558 - protein, 119 aa, Artificial Sequence
  DOM1h-574-54 anti-TNFR1 dAb
EVQLLESGGGLVQPGGSLRLSCAASGFTFVNYSMGWVRQAPGKGLEWVSQISNTGDRTYYADSVKGRFTISRDNSKNTLYLQMNSLRAEDTAVYYCAIYTGRWEPYEYWGQGTLVTVTS

SEQ ID NO: 559 - protein, 119 aa, Artificial Sequence
  DOM1h-574-65 anti-TNFR1 dAb
EVQLLESGGGLVQPGGSLRLSCAASGFTFVKYSMGWVRQAPGKGLEWVSQIANTGDRRYYADSVKGRFTISRDNSKNTLYLQMNSLRAEDTAVYYCAIYTGRWEPFVYWGQGTLVTVSS

SEQ ID NO: 560 - protein, 119 aa, Artificial Sequence
  DOM1h-574-66 anti-TNFR1 dAb
EVQLLESGGGLVQPGGSLRLSCAASGFTFVKYSMGWVRQAPGKGLEWVSQIANTGDRRYYADSVKGRFTISRDNSKNTLYLQMNSLRAEDTAVYYCAIYTGRWKPFEYWGQGTLVTVSS

SEQ ID NO: 561 - protein, 119 aa, Artificial Sequence
  DOM1h-574-67 anti-TNFR1 dAb
EVQLLESGGGLVQPGGSLRLSCAASGFTFVKYSMGWVRQAPGKGLEWVSQIANTGDRRYYADSVKGRFTISRDNSKNTLYLQMNSLRAEDTAVYYCAIYTGRWVPFEYWGQGTLVTVSS

SEQ ID NO: 562 - protein, 119 aa, Artificial Sequence
  DOM1h-574-68 anti-TNFR1 dAb
EVQLLESGGGLVQPGGSLRLSCAASGFTFVKYSMGWVRQAPGKGLEWVSQIANTGDRRYYADSVKGRFTISRDNSKNTLYLQMNSLRAEDTAVYYCAIYTGRWRPFEYWGQGTLVTVSS

SEQ ID NO: 563 - protein, 119 aa, Artificial Sequence
  DOM1h-574-69 anti-TNFR1 dAb
EVQLLESGGGLVQPGGSLRLSCAASGFTFVKYSMGWVRQAPGKGLEWVSQIANTGDRRYYADSVKGRFTISRDNSKNTLYLQMNSLRAEDTAVYYCAIYTGRWAPFEYWGQGTLVTVSS

SEQ ID NO: 564 - protein, 119 aa, Artificial Sequence
  DOM1h-574-70 anti-TNFR1 dAb
EVQLLESGGGLVQPGGSLRLSCAASGFTFVKYSMGWVRQAPGKGLEWVSQISNTADRTYYAHSVKGRFTISRDNSKNTLYLQMNSLRAEDTAVYYCAVYTGRWEPFVYWGQGTLVTVSS

SEQ ID NO: 565 - protein, 119 aa, Artificial Sequence
  DOM1h-574-71 anti-TNFR1 dAb
EVQLLESGGGLVQPGGSLRLSCAASGFTFVKYSMGWVRQAPGKGLEWVSQISNTADRTYYAHSVKGRFTISRDNSKNTLYLQMNSLRAEDTAVYYCAIYTGRWKPFEYWGQGTLVTVSS

SEQ ID NO: 566 - protein, 119 aa, Artificial Sequence
  DOM1h-574-73 anti-TNFR1 dAb
EVQLLESGGGLVQPGGSLRLSCAASGFTFVKYSMGWVRQAPGKGLEWVSQISNTADRTYYAHSVKGRFTISRDNSKNTLYLQMNSLRAEDTAVYYCAIYTGRWRPFEYWGQGTLVTVSS

SEQ ID NO: 567 - protein, 119 aa, Artificial Sequence
  DOM1h-574-74 anti-TNFR1 dAb
EVQLLESGGGLVQPGGSLRLSCAASGFTFVKYSMGWVRQAPGKGLEWVSQISNTADRTYYAHSVKGRFTISRDNSKNTLYLQMNSLRAEDTAVYYCAIYTGRWAPFEYWGQGTLVTVSS

SEQ ID NO: 568 - protein, 119 aa, Artificial Sequence
  DOM1h-574-75 anti-TNFR1 dAb
EVQLLESGGGLVQPGGSLRLSCAASGFTFVKYSMGWVRQAPGKGLEWVSQISDTGDRRYYDDSVKGRFTISRDNSKNTLYLQMNSLRAEDTAVYYCAIYTGRWEPFVYWGQGTLVTVSS

SEQ ID NO: 569 - protein, 119 aa, Artificial Sequence
  DOM1h-574-76 anti-TNFR1 dAb
EVQLLESGGGLVQPGGSLRLSCAASGFTFVKYSMGWVRQAPGKGLEWVSQISDTGDRRYYDDSVKGRFTISRDNSKNTLYLQMNSLRAEDTAVYYCAIYTGRWKPFEYWGQGTLVTVSS

SEQ ID NO: 570 - protein, 119 aa, Artificial Sequence
  DOM1h-574-77 anti-TNFR1 dAb
EVQLLESGGGLVQPGGSLRLSCAASGFTFVKYSMGWVRQAPGKGLEWVSQISDTGDRRYYDDSVKGRFTISRDNSKNTLYLQMNSLRAEDTAVYYCAIYTGRWVPFEYWGQGTLVTVSS

SEQ ID NO: 571 - protein, 119 aa, Artificial Sequence
  DOM1h-574-78 anti-TNFR1 dAb
EVQLLESGGGLVQPGGSLRLSCAASGFTFVKYSMGWVRQAPGKGLEWVSQISDTGDRRYYDDSVKGRFTISRDNSKNTLYLQMNSLRAEDTAVYYCAIYTGRWRPFEYWGQGTLVTVSS

SEQ ID NO: 572 - protein, 119 aa, Artificial Sequence
  DOM1h-574-79 anti-TNFR1 dAb
EVQLLESGGGLVQPGGSLRLSCAASGFTFVKYSMGWVRQAPGKGLEWVSQISDTGDRRYYDDSVKGRFTISRDNSKNTLYLQMNSLRAEDTAVYYCAIYTGRWAPFEYWGQGTLVTVSS

SEQ ID NO: 573 - protein, 119 aa, Artificial Sequence
  DOM1h-574-84 anti-TNFR1 dAb
EVQLLESGGGLVQPGGSLRLSCAASGFTFVKYSMGWVRQAPGKGLEWVSQISNTGDRRYYADAVKGRFTISRDNSKNTLYLQMNSLRAEDTAVYYCAIYTGRWEPFVYWGQGTLVTVSS

SEQ ID NO: 574 - protein, 119 aa, Artificial Sequence
  DOM1h-574-85 anti-TNFR1 dAb
EVQLLESGGGLVQPGGSLRLSCAASGFTFVKYSMGWVRQAPGKGLEWVSQISNTGDRRYYADAVKGRFTISRDNSKNTLYLQMNSLRAEDTAVYYCAIYTGRWKPFEYWGQGTLVTVSS

SEQ ID NO: 575 - protein, 119 aa, Artificial Sequence
  DOM1h-574-86 anti-TNFR1 dAb
EVQLLESGGGLVQPGGSLRLSCAASGFTFVKYSMGWVRQAPGKGLEWVSQISNTGDRRYYADAVKGRFTISRDNSKNTLYLQMNSLRAEDTAVYYCAIYTGRWVPFEYWGQGTLVTVSS

SEQ ID NO: 576 - protein, 119 aa, Artificial Sequence
  DOM1h-574-87 anti-TNFR1 dAb
EVQLLESGGGLVQPGGSLRLSCAASGFTFVKYSMGWVRQAPGKGLEWVSQISNTGDRRYYADAVKGRFTISRDNSKNTLYLQMNSLRAEDTAVYYCAIYTGRWRPFEYWGQGTLVTVSS

SEQ ID NO: 577 - protein, 119 aa, Artificial Sequence
  DOM1h-574-88 anti-TNFR1 dAb
EVQLLESGGGLVQPGGSLRLSCAASGFTFVKYSMGWVRQAPGKGLEWVSQISNTGDRRYYADAVKGRFTISRDNSKNTLYLQMNSLRAEDTAVYYCAIYTGRWAPFEYWGQGTLVTVSS

SEQ ID NO: 578 - protein, 119 aa, Artificial Sequence
  DOM1h-574-90 anti-TNFR1 dAb
EVQLLESGGGLVQPGGSLRLSCAASGFTFLKFSMGWVRQAPGKGLEWVSQIANTGDRRYYADSVKGRFTISRDNSKNTLYLQMNSLRAEDTAVYYCAIYTGRWAPFEYWGQGTLVTVSS

SEQ ID NO: 579 - protein, 119 aa, Artificial Sequence
  DOM1h-574-91 anti-TNFR1 dAb
EVQLLESGGGLVQPGGSLRLSCAASGFTFLKYSMGWVRQAPGKGLEWVSQISNTADRTYYAHSVKGRFTISRDNSKNTLYLQMNSLRAEDTAVYYCAIYTGRWAPFEYWGQGTLVTVSS

SEQ ID NO: 580 - protein, 119 aa, Artificial Sequence
  DOM1h-574-92 anti-TNFR1 dAb
EVQLLESGGGLVQPGGSLRLSCAASGFTFFKYSMGWVRQAPGKGLEWVSQISDTGDRRYYDDSVKGRFTISRDNSKNTLYLQMNSLRAEDTAVYYCAIYTGRWEPFVYWGQGTLVTVSS

SEQ ID NO: 581 - protein, 119 aa, Artificial Sequence
  DOM1h-574-94 anti-TNFR1 dAb
EVQLLESGGGLVQPGGSLRLSCAASGFTFVKYSMGWVRQAPGKGLEWVSQIANTGDRRYYADSVKGRFTISRDNSKNTLYLQMNSLRAEDTAAYYCAIYTGRWPDFDYWGQGTLVTVSS

SEQ ID NO: 582 - protein, 119 aa, Artificial Sequence
  DOM1h-574-95 anti-TNFR1 dAb
EVQLLESGGGLVQPGGSLRLSCAASGFTFVKYSMGWVRQAPGKGLEWVSQIANTGDRRYYADSVKGRFTISRDNSKNTLYLQMNSLRAEDTAAYYCAIYTGRWPDFEYWGQGTLVTVSS

SEQ ID NO: 583 - protein, 119 aa, Artificial Sequence
  DOM1h-574-96 anti-TNFR1 dAb
EVQLLESGGGLVQPGGSLRLSCAASGFTFVKYSMGWVRQAPGKGLEWVSQISNTADRTYYAHSVKGRFTISRDNSKNTLYLQMNSLRAEDTAVYYCAIYTGRWPDFDYWGQGTLVTVSS

SEQ ID NO: 584 - protein, 119 aa, Artificial Sequence
  DOM1h-574-97 anti-TNFR1 dAb
EVQLLESGGGLVQPGGSLRLSCAASGFTFVKYSMGWVRQAPGKGLEWVSQISNTADRTYYAHSVKGRFTISRDNSKNTLYLQMNSLRAEDTAVYYCAIYTGRWPDFEYWGQGTLVTVSS

SEQ ID NO: 585 - protein, 119 aa, Artificial Sequence
  DOM1h-574-98 anti-TNFR1 dAb
EVQLLESGGGLVQPGGSLRLSCAASGFTFVKYSMGWVRQAPGKGLEWVSQISDTGDRRYYDDSVKGRFTISRDNSKNTLYLQMNSLRAEDTAVYYCAIYTGRWPDFDYWGQGTLVTVSS

SEQ ID NO: 586 - protein, 119 aa, Artificial Sequence
  DOM1h-574-99 anti-TNFR1 dAb
EVQLLESGGGLVQPGGSLRLSCAASGFTFVKYSMGWVRQAPGKGLEWVSQISDTGDRRYYDDSVKGRFTISRDNSKNTLYLQMNSLRAEDTAVYYCAIYTGRWPDFEYWGQGTLVTVSS

SEQ ID NO: 587 - protein, 119 aa, Artificial Sequence
  DOM1h-574-100 anti-TNFR1 dAb
EVQLLESGGGLVQPGGSLRLSCAASGFTFVKYSMGWVRQAPGKGPEWVSQISAWGDRTYYADSVKGRFTISRDNSKNTLYLQMNSLRAEDTAVYYCAIYTGRWEPFDYWGQGTLVTVSS

SEQ ID NO: 588 - protein, 119 aa, Artificial Sequence
  DOM1h-574-101 anti-TNFR1 dAb
EVQLLESGGGLVQPGGSLRLSCAASGFTFVKYSMGWVRQAPGKGPEWVSQISDGGQRTYYADSVKGRFTISRDNSKNTLYLQMNSLRAEDTAVYYCAIYTGRWEPFDYWGQGTLVTVSS

SEQ ID NO: 589 - protein, 119 aa, Artificial Sequence
  DOM1h-574-102 anti-TNFR1 dAb
EVQLLESGGGLVQPGGSLRLSCAASGFTFVKYSMGWVRQAPGKGPEWVSQISDSGYRTYYADSVKGRFTISRDNSKNTLYLQMNSLRAEDTAVYYCAIYTGRWEPFDYWGQGTLVTVSS

SEQ ID NO: 590 - protein, 119 aa, Artificial Sequence
  DOM1h-574-103 anti-TNFR1 dAb
EVQLLESGGGLVQPGGSLRLSCAASGFTFVKYSMGWVRQAPGKGPEWVSQISDGGTRTYYADSVKGRFTISRDNSKNTLYLQMNSLRAEDTAVYYCAIYTGRWEPFDYWGQGTLVTVSS

SEQ ID NO: 591 - protein, 119 aa, Artificial Sequence
  DOM1h-574-104 anti-TNFR1 dAb
EVQLLESGGGLVQPGGSLRLSCAASGFTFVKYSMGWVRQAPGKGPEWVSQISDKGTRTYYADSVKGRFTISRDNSKNTLYLQMNSLRAEDTAVYYCAIYTGRWEPFDYWGQGTLVTVSS

SEQ ID NO: 592 - protein, 119 aa, Artificial Sequence
  DOM1h-574-105 anti-TNFR1 dAb
EVQLLESGGGLVQPGGSLRLSCAASGFTFVKYSMGWVRQAPGKGPEWVSQISETGRRTYYADSVKGRFTISRDNSKNTLYLQMNSLRAEDTAVYYCAIYTGRWEPFDYWGQGTLVTVSS

SEQ ID NO: 593 - protein, 119 aa, Artificial Sequence
  DOM1h-574-106 anti-TNFR1 dAb
EVQLLESGGGLVQPGGSLRLSCAASGFTFVKYSMGWVRQAPGKGLEWVSQINNTGSTTYYADSVKGRFTISRDNSKNTLYLQMNSLRAEDTAVYYCAIYTGRWEPFDYWGQGTLVTVSS

SEQ ID NO: 594 - protein, 119 aa, Artificial Sequence
  DOM1h-574-107 anti-TNFR1 dAb
EVQLLESGGGLVQPGGSLRLSCAASGFTFVKYSMGWVRQAPGKGPEWVSQISNTADRTYYAHSVKGRFTISRDNSKNTLYLQMNSLRAEDTAVYYCAIYTGRWVPFEYWGQGTLVTVSS

SEQ ID NO: 595 - protein, 119 aa, Artificial Sequence
  DOM1h-574-108 anti-TNFR1 dAb
EVQLLESGGGLVQPGGSLRLSCAASGFTFVKYSMGWVRQAPGKGPEWVSQISNTADRTYYAHSVKGRFTISRDNSKNTLYLQMNSLRAEDTAVYYCAIYTGRWAPFEYWGQGTLVTVSS

SEQ ID NO: 596 - protein, 119 aa, Artificial Sequence
  DOM1h-574-110 anti-TNFR1 dAb
EVQLLESGGGLVQPGGSLRLSCAASGFTFVKYSMGWVRQAPGKGLEWVSQISDTADRTYYAHSVKGRFTISRDNSKNTLYLQMNSLRAEDTAVYYCAIYTGRWAPFEYWGQGTLVTVSS

SEQ ID NO: 597 - protein, 119 aa, Artificial Sequence
  DOM1h-574-111 anti-TNFR1 dAb
EVQLLESGGGLVQPGGSLRLSCAASGFTFVKYSMGWVRQAPGKGLEWVSQISDTADRTYYDDSVKGRFTISRDNSKNTLYLQMNSLRAEDTAVYYCAIYTGRWRPFEYWGQGTLVTVSS

SEQ ID NO: 598 - protein, 119 aa, Artificial Sequence
  DOM1h-574-112 anti-TNFR1 dAb
EVQLLESGGGLVQPGGSLRLSCAASGFTFVKYSMGWVRQAPGKGLEWVSQISDTADRTYYTHSVKGRFTISRDNSKNTLYLQMNSLRAEDTAVYYCAIYTGRWAPFEYWGQGTLVTVSS

SEQ ID NO: 599 - protein, 119 aa, Artificial Sequence
  DOM1h-574-113 anti-TNFR1 dAb
EVQLLESGGGLVQPGGSLRLSCAASGFTFVKYSMGWVRQAPGKGLEWVSQISNTADRRYYAHSVKGRFTISRDNSKNTLYLQMNSLRAEDTAVYYCAIYTGRWAPFEYWGQGTLVTVSS

SEQ ID NO: 600 - protein, 119 aa, Artificial Sequence
  DOM1h-574-114 anti-TNFR1 dAb
EVQLLESGGGLVQPGGSLRLSCAASGFTFVKYSMGWVRQAPGKGLEWVSQILNTADRTYYDHSVKGRFTISRDNSKNTLYLQMNSLRAEDTAVYYCAIYTGRWAPFEYWGQGTLVTVSS

SEQ ID NO: 601 - protein, 119 aa, Artificial Sequence
  DOM1h-574-115 anti-TNFR1 dAb
EVQLLESGGGLVQPGGSLRLSCAASGFTFVKYSMGWVRQAPGKGLEWVSQISNTADRTYYDHSVKGRFTISRDNSKNTLYLQMNSLRAEDTAVYYCAIYTGRWAPFEYWGQGTLVTVSS

SEQ ID NO: 602 - protein, 119 aa, Artificial Sequence
  DOM1h-574-116 anti-TNFR1 dAb
EVQLLESGGGLVQPGGSLRLSCAASGFTFVKYSMGWVRQAPGKGLEWVSQISDTADRRYYAHSVKGRFTISRDNSKNTLYLQMNSLRAEDTAVYYCAIYTGRWAPFEYWGQGTLVTVSS

SEQ ID NO: 603 - protein, 119 aa, Artificial Sequence
  DOM1h-574-117 anti-TNFR1 dAb
EVQLLESGGGLVQPGGSLRLSCAASGFTFVKYSMGWVRQAPGKGLEWVSQISDTADRRYYDHSVKGRFTISRDNSKNTLYLQMNSLRAEDTAVYYCAIYTGRWAPFEYWGQGTLVTVSS

SEQ ID NO: 604 - protein, 119 aa, Artificial Sequence
  DOM1h-574-118 anti-TNFR1 dAb
EVQLLESGGGLVQPGGSLRLSCAASGFTFVKYSMGWVRQAPGKGLEWVSQISNTADRTYYAHSVKGRFTISRDNSKNTLYLQMNSLRAEDTAVYYCAVYTGRWVSFEYWGQGTLVTVSS

SEQ ID NO: 605 - protein, 119 aa, Artificial Sequence
  DOM1h-574-119 anti-TNFR1 dAb
EVQLLESGGGLVQPGGSLRLSCAASGFTFVKYSMGWVRQAPGKGLEWVSQISNTADRTYYAHSVKGRFTISRDNSKNTLYLQMNSLRAEDTAVYYCALYTGRWVSFEYWGQGTLVTVSS

SEQ ID NO: 606 - protein, 119 aa, Artificial Sequence
  DOM1h-574-120 anti-TNFR1 dAb
EVQLLESGGGLVQPGGSLRLSCAASGFTFVKYSMGWVRQAPGKGLEWVSQISNTADRTYYAHSVKGRFTISRDNSKNTLYLQMNSLRAEDTAVYYCAVYTGRWVPFEYWGQGTLVTVSS

SEQ ID NO: 607 - protein, 119 aa, Artificial Sequence
  DOM1h-574-121 anti-TNFR1 dAb
EVQLLESGGGLVQPGGSLRLSCAASGFTFVKYSMGWVRQAPGKGLEWVSQISNTADRTYYAHSVKGRFTISRDNSKNTLYLQMNSLRAEDTAVYYCALYTGRWVPFEYWGQGTLVTVSS

SEQ ID NO: 608 - protein, 119 aa, Artificial Sequence
  DOM1h-574-122 anti-TNFR1 dAb
EVQLLESGGGLVQPGGSLRLSCAASGFTFVKYSMGWVRQAPGKGLEWVSQIANTADRRYYAHSVKGRFTISRDNSKNTLYLQMNSLRAEDTAVYYCAIYTGRWAPFEYWGQGTLVTVSS

SEQ ID NO: 609 - protein, 119 aa, Artificial Sequence
  DOM1h-574-124 anti-TNFR1 dAb
EVQLLESGGGLVQPGGSLRLSCAASGFTFVKYSMGWVRQAPGKGLEWVSQISNTGDRRYYAHAVKGRFTISRDNSKNTLYLQMNSLRAEDTAVYYCAIYTGRWEPFVYWGQGTLVTVSS

SEQ ID NO: 610 - protein, 119 aa, Artificial Sequence
  DOM1h-574-127 anti-TNFR1 dAb
EVQLLESGGGLVQPGGSLRLSCAASGFTFVKYSMGWVRQAPGKGLEWVSQISNTADRRYYAHAVKGRFTISRDNSKNTLYLQMNSLRAEDTAVYYCAIYTGRWEPFVYWGQGTLVTVSS

SEQ ID NO: 611 - protein, 119 aa, Artificial Sequence
  DOM1h-574-128 anti-TNFR1 dAb
EVQLLESGGGLVQPGGSLRLSCAASGFTFVKYSMGWVRQAPGKGLEWVSQIANTADRRYYAHAVKGRFTISRDNSKNTLYLQMNSLRAEDTAVYYCAIYTGRWEPFVYWGQGTLVTVSS

SEQ ID NO: 612 - protein, 119 aa, Artificial Sequence
  DOM1h-574-130 anti-TNFR1 dAb
EVQLLESGGGLVQPGGSLRLSCAASGFTFVKYSMGWVRQAPGKGLEWVSQIANTGDRRYYADAVKGRFTISRDNSKNTLYLQMNSLRAEDTAVYYCAIYTGRWEPFVYWGQGTLVTVSS

SEQ ID NO: 613 - protein, 119 aa, Artificial Sequence
  DOM1h-574-131 anti-TNFR1 dAb
EVQLLESGGGLVQPGGSLRLSCAASGFTFVKYSMGWVRQAPGKGLEWVSQISDTADRTYYDHSVKGRFTISRDNSKNTLYLQMNSLRAEDTAVYYCAIYTGRWAPFEYWGQGTLVTVSS

SEQ ID NO: 614 - protein, 119 aa, Artificial Sequence
  DOM1h-574-134 anti-TNFR1 dAb
EVQLLESGGGLVQPGGSLRLSCAASGFTFVKYSMGWVRQAPGKGLEWVSQISDTADRTYYSHSVKGRFTISRDNSKNTLYLQMNSLRAEDTAVYYCAIYTGRWVPFEYWGQGTLVTVSS

SEQ ID NO: 615 - protein, 119 aa, Artificial Sequence
  DOM1h-574-140 anti-TNFR1 dAb
EVQLLESGGGLVQPGGSLRLSCAASGFTFFKYSMGWVRQAPGKGLEWVSQIADTGDRRYYDDSVKGRFTISRDNSKNTLYLQMNSLRAEDTAVYYCAIYTGRWEPFVYWGQGTLVTVSS

SEQ ID NO: 616 - protein, 119 aa, Artificial Sequence
  DOM1h-574-141 anti-TNFR1 dAb
EVQLLESGGGLVQPGGSLRLSCAASGFTFFKYSMGWVRQAPGKGLEWVSQISDTADRRYYDDSVKGRFTISRDNSKNTLYLQMNSLRAEDTAVYYCAIYTGRWEPFVYWGQGTLVTVSS

SEQ ID NO: 617 - protein, 119 aa, Artificial Sequence
  DOM1h-574-142 anti-TNFR1 dAb
EVQLLESGGGLVQPGGSLRLSCAASGFTFFKYSMGWVRQAPGKGLEWVSQISDTGDRRYYDHSVKGRFTISRDNSKNTLYLQMNSLRAEDTAVYYCAIYTGRWEPFVYWGQGTLVTVSS

SEQ ID NO: 618 - protein, 119 aa, Artificial Sequence
  DOM1h-574-143 anti-TNFR1 dAb
EVQLLESGGGLVQPGGSLRLSCAASGFTFFKYSMGWVRQAPGKGLEWVSQISDTGDRRYYDDAVKGRFTISRDNSKNTLYLQMNSLRAEDTAVYYCAIYTGRWEPFVYWGQGTLVTVSS

SEQ ID NO: 619 - protein, 119 aa, Artificial Sequence
  DOM1h-574-144 anti-TNFR1 dAb
EVQLLESGGGLVQPGGSLRLSCAASGFTFFKYSMGWVRQAPGKGLEWVSQIADTADRRYYDDSVKGRFTISRDNSKNTLYLQMNSLRAEDTAVYYCAIYTGRWEPFVYWGQGTLVTVSS

SEQ ID NO: 620 - protein, 119 aa, Artificial Sequence
  DOM1h-574-145 anti-TNFR1 dAb
EVQLLESGGGLVQPGGSLRLSCAASGFTFFKYSMGWVRQAPGKGLEWVSQIADTGDRRYYDHSVKGRFTISRDNSKNTLYLQMNSLRAEDTAVYYCAIYTGRWEPFVYWGQGTLVTVSS

SEQ ID NO: 621 - protein, 119 aa, Artificial Sequence
  DOM1h-574-146 anti-TNFR1 dAb
EVQLLESGGGLVQPGGSLRLSCAASGFTFFKYSMGWVRQAPGKGLEWVSQIADTGDRRYYDDAVKGRFTISRDNSKNTLYLQMNSLRAEDTAVYYCAIYTGRWEPFVYWGQGTLVTVSS

SEQ ID NO: 622 - protein, 119 aa, Artificial Sequence
  DOM1h-574-147 anti-TNFR1 dAb
EVQLLESGGGLVQPGGSLRLSCAASGFTFVKYSMGWVRQAPGKGLEWVSQISDTADRTYYAHSVKGRFTISRDNSKNTLYLQMNSLRAEDTAVYYCAIYTGRWGPFVYWGQGTLVTVSS

SEQ ID NO: 623 - protein, 119 aa, Artificial Sequence
  DOM1h-574-148 anti-TNFR1 dAb
EVQLLESGGGLVQPGGSLRLSCAASGFTFVKYSMGWVRQAPGKGLEWVSQISDTADRTYYAHSVKGRFTISRDNSKNTLYLQMNSLRAEDTAVYYCAIYTGRWVPFAYWGQGTLVTVSS

SEQ ID NO: 624 - protein, 119 aa, Artificial Sequence
  DOM1h-574-149 anti-TNFR1 dAb
EVQLLESGGGLVQPGGSLRLSCAASGFTFVKYSMGWVRQAPGKGLEWVSQISDTADRTYYAHSVKGRFTISRDNSKNTLYLQMNSLRAEDTAVYYCAIYTGRWGPFQYWGQGTLVTVSS

SEQ ID NO: 625 - protein, 119 aa, Artificial Sequence
  DOM1h-574-150 anti-TNFR1 dAb
EVQLLESGGGLVQPGGSLRLSCAASGFTFVKYSMGWVRQAPGKGLEWVSQISDTADRTYYAHSVKGRFTISRDNSKNTLYLQMNSLRAEDTAVYYCAIYTGRWEPFQYWGQGTLVTVSS

SEQ ID NO: 626 - protein, 119 aa, Artificial Sequence; identical to SEQ ID NO: 596
  DOM1h-574-151 anti-TNFR1 dAb

SEQ ID NO: 627 - protein, 119 aa, Artificial Sequence
  DOM1h-574-152 anti-TNFR1 dAb
EVQLLESGGGLVQPGGSLRLSCAASGFTFVKYSMGWVRQAPGKGLEWVSQISDTADRTYYAHSVKGRFTISRDNSKNTLYLQMNSLRAEDTAVYYCAIYTGRWAPFQYWGQGTLVTVSS

SEQ ID NO: 628 - protein, 119 aa, Artificial Sequence
  DOM1h-574-153 anti-TNFR1 dAb
EVQLLESGGGLVQPGGSLRLSCAASGFTFVKYSMGWVRQAPGKGLEWVSQISDTADRTYYAHSVKGRFTISRDNSKNTLYLQMNSLRAEDTAVYYCAIYTGRWVPFQYWGQGTLVTVSS

SEQ ID NO: 629 - protein, 119 aa, Artificial Sequence
  DOM1h-574-154 anti-TNFR1 dAb
EVQLLESGGGLVQPGGSLRLSCAASGFTFVKYSMGWVRQAPGKGLEWVSQISDTGDRRYYDHSVKGRFTISRDNSKNTLYLQMNSLRAEDTAVYYCAIYTGRWAPFEYWGQGTLVTVSS

SEQ ID NO: 630 - protein, 119 aa, Artificial Sequence
  DOM1h-574-157 anti-TNFR1 dAb
EVQLLESGGGLVQPGGSLRLSCAASGFTFLKYSMGWVRQAPGKGLEWVSQISDTADRTYYDHSVKGRFTISRDNSKNTLYLQMNSLRAEDTAVYYCAIYTGRWRPFEYWGQGTLVTVSS

SEQ ID NO: 631 - protein, 119 aa, Artificial Sequence
  DOM1h-574-158 anti-TNFR1 dAb
EVQLLESGGGLVQPGGSLRLSCAASGFTFFKYSMGWVRQAPGKGLEWVSQISDTADRTYYDHSVKGRFTISRDNSKNTLYLQMNSLRAEDTAVYYCAIYTGRWRPFEYWGQGTLVTVSS

SEQ ID NO: 632 - protein, 119 aa, Artificial Sequence
  DOM1h-574-159 anti-TNFR1 dAb
EVQLLESGGGLVQPGGSLRLSCAASGFTFFKYSMGWVRQAPGKGLEWVSQISDTADRTYYDHSVKGRFTISRDNSKNTLYLQMNSLRAEDTAVYYCAIYTGRWEPFVYWGQGTLVTVSS

SEQ ID NO: 633 - protein, 119 aa, Artificial Sequence
  DOM1h-574-161 anti-TNFR1 dAb
EVQLLESGGGLVQPGGSLRLSCAASGFTFLKYSMGWVRQAPGKGLEWVSQISDTADRTYYSHSVKGRFTISRDNSKNTLYLQMNSLRAEDTAVYYCAIYTGRWVPFEYWGQGTLVTVSS

SEQ ID NO: 634 - protein, 119 aa, Artificial Sequence
  DOM1h-574-163 anti-TNFR1 dAb
EVQLLESGGGLVQPGGSLRLSCAASGFTFFKYSMGWVRQAPGKGLEWVSQISDTADRTYYTHSVKGRFTISRDNSKNTLYLQMNSLRAEDTAVYYCAIYTGRWVPFEYWGQGTLVTVSS

SEQ ID NO: 635 - protein, 119 aa, Artificial Sequence
  DOM1h-574-164 anti-TNFR1 dAb
EVQLLESGGGLVQPGGSLRLSCAASGFTFLKYSMGWVRQAPGKGLEWVSQISDTADRTYYTHSVKGRFTISRDNSKNTLYLQMNSLRAEDTAVYYCAIYTGRWVPFEYWGQGTLVTVSS

SEQ ID NO: 636 - protein, 119 aa, Artificial Sequence; identical to SEQ ID NO: 511
  DOM1h-574-165 anti-TNFR1 dAb

SEQ ID NO: 637 - protein, 119 aa, Artificial Sequence; identical to SEQ ID NO: 524
  DOM1h-574-166 anti-TNFR1 dAb

SEQ ID NO: 638 - protein, 119 aa, Artificial Sequence
  DOM1h-574-167 anti-TNFR1 dAb
EVQLLESGGGLVQPGGSLRLSCAASGFTFLKYSMGWVRQAPGKGLEWVSQISDTGDRRYYDHSVKGRFTISRDNSKNTLYLQMNSLRAEDTAVYYCAIYTGRWAPFEYWGQGTLVTVSS

SEQ ID NO: 639 - protein, 119 aa, Artificial Sequence
  DOM1h-574-168 anti-TNFR1 dAb
EVQLLESGGGLVQPGGSLRLSCAASGFTFFKYSMGWVRQAPGKGLEWVSQISDTGDRRYYDHSVKGRFTISRDNSKNTLYLQMNSLRAEDTAVYYCAIYTGRWAPFEYWGQGTLVTVSS

SEQ ID NO: 640 - protein, 119 aa, Artificial Sequence
  DOM1h-574-169 anti-TNFR1 dAb
EVQLLESGGGLVQPGGSLRLSCAASGFTFVKYSMGWVRQAPGKGLEWVSQIADTADRTYYAHSVKGRFTISRDNSKNTLYLQMNSLRAEDTAVYYCAIYTGRWVPFEYWGQGTLVTVSS

SEQ ID NO: 641 - protein, 119 aa, Artificial Sequence
  DOM1h-574-170 anti-TNFR1 dAb
EVQLLESGGGLVQPGGSLRLSCAASGFTFFKYSMGWVRQAPGKGLEWVSQISDTADRTYYAHAVKGRFTISRDNSKNTLYLQMNSLRAEDTAVYYCAIYTGRWVPFEYWGQGTLVTVSS

SEQ ID NO: 642 - protein, 119 aa, Artificial Sequence
  DOM1h-574-171 anti-TNFR1 dAb
EVQLLESGGGLVQPGGSLRLSCAASGFTFVKYSMGWVRQAPGKGLEWVSQIADTADRTYYDHSVKGRFTISRDNSKNTLYLQMNSLRAEDTAVYYCAIYTGRWVPFEYWGQGTLVTVSS

SEQ ID NO: 643 - protein, 119 aa, Artificial Sequence
  DOM1h-574-172 anti-TNFR1 dAb
EVQLLESGGGLVQPGGSLRLSCAASGFTFVKYSMGWVRQAPGKGLEWVSQIADTADRTYYDHAVKGRFTISRDNSKNTLYLQMNSLRAEDTAVYYCAIYTGRWVPFEYWGQGTLVTVSS

SEQ ID NO: 644 - protein, 119 aa, Artificial Sequence
  DOM1h-574-173 anti-TNFR1 dAb
EVQLLESGGGLVQPGGSLRLSCAASGFTFVKYSMGWVRQAPGKGLEWVSQIADTADRRYYAHSVKGRFTISRDNSKNTLYLQMNSLRAEDTAVYYCAIYTGRWAPFEYWGQGTLVTVSS

SEQ ID NO: 645 - protein, 119 aa, Artificial Sequence
  DOM1h-574-174 anti-TNFR1 dAb
EVQLLESGGGLVQPGGSLRLSCAASGFTFVKYSMGWVRQAPGKGLEWVSQISDTADRRYYAHAVKGRFTISRDNSKNTLYLQMNSLRAEDTAVYYCAIYTGRWAPFEYWGQGTLVTVSS

SEQ ID NO: 646 - protein, 119 aa, Artificial Sequence
  DOM1h-574-175 anti-TNFR1 dAb
EVQLLESGGGLVQPGGSLRLSCAASGFTFVKYSMGWVRQAPGKGLEWVSQIADTADRRYYAHAVKGRFTISRDNSKNTLYLQMNSLRAEDTAVYYCAIYTGRWAPFEYWGQGTLVTVSS

SEQ ID NO: 647 - protein, 119 aa, Artificial Sequence
  DOM1h-574-176 anti-TNFR1 dAb
EVQLLESGGGLVQPGGSLRLSCAASGFTFVKYSMGWVRQAPGKGLEWVSQISDTADRRYYDHAVKGRFTISRDNSKNTLYLQMNSLRAEDTAVYYCAIYTGRWAPFEYWGQGTLVTVSS

SEQ ID NO: 648 - protein, 119 aa, Artificial Sequence
  DOM1h-574-177 anti-TNFR1 dAb
EVQLLESGGGLVQPGGSLRLSCAASGFTFVKYSMGWVRQAPGKGLEWVSQIADTADRRYYDHAVKGRFTISRDNSKNTLYLQMNSLRAEDTAVYYCAIYTGRWAPFEYWGQGTLVTVSS

SEQ ID NO: 649 - protein, 119 aa, Artificial Sequence
  DOM1h-574-178 anti-TNFR1 dAb
EVQLLESGGGLVQPGGSLRLSCAASGFTFVKYSMGWVRQAPGKGLEWVSQIADTADRRYYDHSVKGRFTISRDNSKNTLYLQMNSLRAEDTAVYYCAIYTGRWAPFEYWGQGTLVTVSS

SEQ ID NO: 650 - protein, 119 aa, Artificial Sequence
  DOM1h-574-179 anti-TNFR1 dAb
EVQLLESGGGLVQPGGSLRLSCAASGFTFFKYSMGWVRQAPGKGLEWVSQISDTADRRYYDDAVKGRFTITRDNSKNTLYLQMNSLRAEDTAVYYCAIYTGRWEPFVYWGQGTLVTVSS

SEQ ID NO: 651 - protein, 119 aa, Artificial Sequence
  DOM1h-574-188 anti-TNFR1 dAb
EVQLLESGGGLVQPGGSLRLSCAASGFTFDKYSMGWVRQAPGKGLEWVSQISDTADRTYYAHSVKGRFTISRDNSKNTLYLQMNSLRAEDTAVYYCAIYTGRWVPFEYWGQGTLVTVSS

SEQ ID NO: 652 - protein, 119 aa, Artificial Sequence
  DOM1h-574-189 anti-TNFR1 dAb
EVQLLESGGGLVQPGGSLRLSCAASGFTFFKYSMGWVRQAPGKGLEWVSQISDTADRTYYAHSVKGRFTISRDNSKNTLYLQMNSLRAEDTAVYYCAVYTGRWEPFEYWGQGTLVTVSS

SEQ ID NO: 653 - protein, 119 aa, Artificial Sequence
  DOM1h-574-190 anti-TNFR1 dAb
EVQLLESGGGLVQPGGSLRLSCAASGFTFFKYSMGWIRQAPGKGLEWVSQISDTADRTYYAHSVKGRFTISRDNSKNTLYLQMNSLRAEDTAVYYCAVYTGRWAPFEYWGQGTLVTVSS

SEQ ID NO: 654 - protein, 119 aa, Artificial Sequence
  DOM1h-574-191 anti-TNFR1 dAb
EVQLLESGGGLVQPGGSLRLSCAASGFTFSKYSMGWVRQAPGKGLEWVSQISDTADRTYYAHSVKGRFTISRDNSKNTLYLQMNSLRAEDTAVYYCAIYTGRWVPFEYWGQGTLVTVSS

SEQ ID NO: 655 - protein, 119 aa, Artificial Sequence
  DOM1h-574-192 anti-TNFR1 dAb
EVQLLESGGGLVQPGGSLRLSCAASGFTFSKYSMGWVRQAPGKGLEWVSQISDTADRTYYAHSVKGRFTISRDNSKNTLYLQMNSLRAEDTAVYYCAIYTGRWVPFENWGQGTLVTVSS

SEQ ID NO: 656 - protein, 119 aa, Artificial Sequence
  DOM1h-574-193 anti-TNFR1 dAb
EVQLLESGGGLVQPGGSLRLSCAASGFTFDKYSMGWVRQAPGKGPEWVSQISDTADRTYYAHSVKGRFTNSRDNSKNTLYLQMNSLRAEDTAVYYCAIYTGRWEPFEYWGQGTLVTVSS

SEQ ID NO: 657 - protein, 119 aa, Artificial Sequence; identical to SEQ ID NO: 514
  DOM1h-574-194 anti-TNFR1 dAb

SEQ ID NO: 658 - protein, 119 aa, Artificial Sequence
  DOM1h-574-195 anti-TNFR1 dAb
EVQLLESGGGLVQPGGSLRLSCAASGFTFFKYSMGWVRQAPGKGLEWVSQISDTADRTYYAHSVKGRFTISRDNSKNTLYLQMNSLRAEDTAVYYCAIYTGRWEPFEYWGQGTLVTVSS

SEQ ID NO: 659 - protein, 119 aa, Artificial Sequence
  DOM1h-574-196 anti-TNFR1 dAb
EVQLLESGGGLVQPGGSLRLSCAASGFTFSKYSMGWVRQAPGKGLEWVSQISDTADRTYYAHSVKGRFTISRDNSKNTLYLQMNSLRAEDTAVYYCAIYTGRWEPFEYWGQGTLVTVSS

SEQ ID NO: 660 - protein, 119 aa, Artificial Sequence
  DOM1h-574-201 anti-TNFR1 dAb
EVQLLESGGGLVQPGGSLRLSCAASGFTFDKNSMGWVRQAPGKGLEWVSQISDTADRTYYAHSLKGRFTISRDNSKNTLYLQMNSLRAEDTAVYYCAIYTGRWVPFEYWGQGTLVTVSS

SEQ ID NO: 661 - protein, 119 aa, Artificial Sequence
  DOM1h-574-202 anti-TNFR1 dAb
EVQLLESGGGLVQPGGSLRLSCAASGFTFFKYSMGWVRQAPGKGLEWVSQISDTADRTYYAHSVKGRFTISRDNSKNTLYLQMNSLRAEDTAVYYCAVYTGRWAPFEYWGQGTLVTVSS

SEQ ID NO: 662 - protein, 119 aa, Artificial Sequence
  DOM1h-574-203 anti-TNFR1 dAb
EVQLLESGGGLVQPGGSLRLSCAASGFTFFKYSMGWVRQAPGKGLEWVSQISDTADRTYYAHSVKGRFTISRDDSKNTLYLQMNSLRAEDTAVYYCAIYTGRWAPFEYWGQGTLVTVSS

SEQ ID NO: 663 - protein, 119 aa, Artificial Sequence
  DOM1h-574-204 anti-TNFR1 dAb
EVQLLESGGGLVQPGGSLRLSCAASGFTFFKYSMGWVRQAPGKGLEWVSQISDTADRTYYAHSVKGRFTISRDNSKNTLYLQMNSLRVEDTAVYYCAIYTGQWAPYEYWGQGTLVTVRA

SEQ ID NO: 664 - protein, 119 aa, Artificial Sequence
  DOM1h-574-205 anti-TNFR1 dAb
EVQLLESGGGLVQPGGSLRLSCAASGFTFDKYSMGWVRQAPGKDLEWVSQISDTADRTYYAHSVKGRFTISRDNSKNTLYLQMNSLRAEDTAVYYCAIYTGRWVPFENWGHGTLVTVSS

SEQ ID NO: 665 - protein, 119 aa, Artificial Sequence
  DOM1h-574-206 anti-TNFR1 dAb
EVQLLDSGGGLVQPGGSLRLSCAASGFTFFKYSMGWVRQAPGKGLEWVSQISDTADRTYYSPSVKGRFTISRDNSGNTLNLQMTPLRAEDTAVYYCAIYTGRWEPFEYWGQGTLVTVSS

SEQ ID NO: 666 - protein, 119 aa, Artificial Sequence
  DOM1h-574-207 anti-TNFR1 dAb
EVQLLESGGGMVQPGGSLRLSCASSGFTFSKYSMGWVRQAPGKGLEWVSQISDTADLTYYAHSVKGRFTISRDNSKNTLYLQMNSLRAEDTAEYYCAIYTGRWAPFEYWGQGTLVTVSS

SEQ ID NO: 667 - protein, 119 aa, Artificial Sequence; identical to SEQ ID NO: 54
  DOM1h-574-208 anti-TNFR1 dAb

SEQ ID NO: 668 - protein, 119 aa, Artificial Sequence
  DOM1h-574-209 anti-TNFR1 dAb
EVQLLESGGGLVQPGGSLRLSCAASGFTFFKYSMGWVRQAPGKGLEWVSQISDTADRTYYAHSVKGRFTISRDNSKNTLYLQMNSLRVEDTAVYYCAIYTGQWAPYEYWGQGTLVTVSS

SEQ ID NO: 669 - protein, 119 aa, Artificial Sequence
  DOM1h-574-211 anti-TNFR1 dAb
EVQLLESGGGLVQPGGSLRLSCAASGFTFAKYSMGWVRQAPGKGLEWVSQISDTADRTYYAHAVKGRFTISRDNSKNTLYLQMNSLRAEDTAVYYCAIYTGRWVPFEYWGQGTLVTVSS

SEQ ID NO: 670 - protein, 119 aa, Artificial Sequence; identical to SEQ ID NO: 654
  DOM1h-574-212 anti-TNFR1 dAb

SEQ ID NO: 671 - protein, 119 aa, Artificial Sequence
  DOM1h-574-213 anti-TNFR1 dAb
EVQLLESGGGLVQPGGSLRLSCAASGFTFDKYSMGWVRQAPGKGLEWVSQISDTADRTYYAHSVKGRFTITRDNSKNTLYLQMNSLRAEDTAVYYCAIYTGRWEPFEYWGQGTLVTVSS

SEQ ID NO: 672 - protein, 119 aa, Artificial Sequence
  DOM1h-574-214 anti-TNFR1 dAb
EVQLLESGGGLVQPGGSLRLSCAASGFTFSKYSMGWVRQAPGKGLEWVSQISDTADRTYYADSVKGRFTISRDNSKNTLYLQMNSLRAEDTAVYYCAIYTGRWVPFEYWGQGTLVTVSS

SEQ ID NO: 673 - protein, 251 aa, Artificial Sequence
  ATROSAB scFv (scFv IZI06.1)
QVQLVQSGAEVKKPGSSVKVSCKASGYTFTDFYINWVRQAPGQGLEWIGEIYPYSGHAYYNEKFKARVTITADKSTSTAYMELSSLRSEDTAVYYCARWDFLDYWGQGTTVTVSSGGGGSGGGGSGGSAQDIVMTQSPLSLPVTPGEPASISCRSSQSLLHSNGNTYLHWYLQKPGQSPQLLIYTVSNRFSGVPDRFSGSGSGTDFTLKISRVEAEDVGVYYCSQSTHVPYTFGGGTKVEIKRGGSGGAAA

SEQ ID NO: 674 - protein, 243 aa, Artificial Sequence
  scFV IG11
QVQLVQSGAEVKKPGSSVKVSCKASGYTFTDFYINWVRQAPGQGLEWIGEIVPTQGEAKYNDKFKARVTITADKSTSTAYMELSSLRSEDTAVYYCARWDFLDYWGQGTTVTVSSGGGGSGGGGSGGSAQDIVMTQSPLSLPVTPGEPASISCRSSQSLLHSNGNTYLHWYLQKPGQSPQLLIYTVSNRFSGVPDRFSGSGSGTDFTLKISRVEAEDVGVYYCSQSTHVPYTFGGGTKVEIKR

SEQ ID NO: 675 - protein, 243 aa, Artificial Sequence
  scFV T12B
HVQLVQSGAEVKKPGSSVKVSCKASGYTFTDFYINWVRQAPGQGLEWIGEIVPSQGEAKYNDKFKARVTITADKSTSTAYMELSSLRSEDTAVYYCARWDFLDYWGQGTTVTVSSGGGGSGGGGSGGSAQDIVMTQSPLSLPVTPGEPASISCRSSQSLLHSNGNTYLHWYLQKPGQSPQLLIYTVSNRFSGVPDRFSGSGSGTDFTLKISRVEAEDVGVYYCSQGTHVPYTFGGGTKVEIKR

SEQ ID NO: 676 - protein, 242 aa, Artificial Sequence
  scFV 13.7
HVQLVQSGAEVKKPGSSVKVSCKASGYTFTDFYINWVRQAPGQGLEWIGEIVPSQGEAKYNDKFKARVTITADKSTSTAYMELSSLRSEDTAVYYCARWDFLDYWGQGTTVTVSSGGGGSGGGGSGGGGSDVQMTQSPSSLSASVGDRVTITCRSSQSLLHSNGNTYLHWYQQKPGKAPKLLIYTVSNRFSGVPSRFSGSGSGTDFTLTISSLQPEDFATYYCSQSTHVPYTFGGGTKVEIK

SEQ ID NO: 677 - protein, 231 aa, Artificial Sequence
  H398 scFV w/ AST linker
QVQLQESGAELARPGASVKLSCKASGYTFTDFYINWVKQRTGQGLEWIGEIYPYSGHAYYNEKFKAKATLTADKSSSTAFMQLNSLTSEDSAVYFCVRWDFLDYWGQGTTLTVSSASTDIVMTQSPLSLPVSLGDQASISCRSSQSLLHSNGNTYLHWYVQKPGQSPKLLIYTVSNRFSGVPDRFSGSGSGTDFTLKISRVEAEDLGVYFCSQSTHVPYTFGGGTKLEIKR

SEQ ID NO: 678 - protein, 243 aa, Artificial Sequence
  H398 scFv  w/ (GGGGS)3 linker
QVQLQESGAELARPGASVKLSCKASGYTFTDFYINWVKQRTGQGLEWIGEIYPYSGHAYYNEKFKAKATLTADKSSSTAFMQLNSLTSEDSAVYFCVRWDFLDYWGQGTTLTVSSGGGGSGGGGSGGGGSDIVMTQSPLSLPVSLGDQASISCRSSQSLLHSNGNTYLHWYVQKPGQSPKLLIYTVSNRFSGVPDRFSGSGSGTDFTLKISRVEAEDLGVYFCSQSTHVPYTFGGGTKLEIKR

SEQ ID NO: 679 - protein, 219 aa, Artificial Sequence; identical to SEQ ID NO: 32
  FabATR (ATROSAB Fab) light chain

SEQ ID NO: 680 - protein, 218 aa, Artificial Sequence
  FabATR (ATROSAB Fab) heavy chain
QVQLVQSGAEVKKPGSSVKVSCKASGYTFTDFYINWVRQAPGQGLEWIGEIYPYSGHAYYNEKFKARVTITADKSTSTAYMELSSLRSEDTAVYYCARWDFLDYWGQGTTVTVSSASTKGPSVFPLAPSSKSTSGGTAALGCLVKDYFPEPVTVSWNSGALTSGVHTFPAVLQSSGLYSLSSVVTVPSSSLGTQTYICNVNHKPSNTKVDKKVEPKSC

SEQ ID NO: 681 - protein, 219 aa, Artificial Sequence
  Fab 13.7 light chain
DVQMTQSPSSLSASVGDRVTITCRSSQSLLHSNGNTYLHWYQQKPGKAPKLLIYTVSNRFSGVPSRFSGSGSGTDFTLTISSLQPEDFATYYCSQSTHVPYTFGGGTKVEIKRTVAAPSVFIFPPSDEQLKSGTASVVCLLNNFYPREAKVQWKVDNALQSGNSQESVTEQDSKDSTYSLSSTLTLSKADYEKHKVYACEVTHQGLSSPVTKSFNRGEC

SEQ ID NO: 682 - protein, 218 aa, Artificial Sequence
  Fab 13.7 heavy chain
HVQLVQSGAEVKKPGSSVKVSCKASGYTFTDFYINWVRQAPGQGLEWIGEIVPSQGEAKYNDKFKARVTITADKSTSTAYMELSSLRSEDTAVYYCARWDFLDYWGQGTTVTVSSASTKGPSVFPLAPSSKSTSGGTAALGCLVKDYFPEPVTVSWNSGALTSGVHTFPAVLQSSGLYSLSSVVTVPSSSLGTQTYICNVNHKPSNTKVDKKVEPKSC

SEQ ID NO: 683 - protein, 119 aa, Artificial Sequence
  Nb 70 nanobody
QVQLQESGGGLVQAGGPLRLSCAASVRTFSSYAMGWFRQAPGKEREFVAAISWSGGSTYYADSVKGRFTISRDNAKNTVYLQMNSLKPEDTAVYYCAVLHEDLYEYDYWGQGTQVTVSS

SEQ ID NO: 684 - protein, 124 aa, Artificial Sequence
  Nb 96 nanobody
QVQLQESGGGVVQPGGSLTLSCTRTGFTASTNAYGWYRQGPGKKCEWVSYMTIPSGRTTYADAVKGRFAMSRDKAKSTVFLQMNSLKPEDTAVYYCGDVPFSTLPAMCTNDGPWGQGTQVTVSS

SEQ ID NO: 685 - protein, 157 aa, Artificial Sequence
  TNFR1-selective antagonist TNF mutein R32W/S86T
VRSSSRTPSDKPVAHVVANPQAEGQLQWLNRWANALLANGVELRDNQLVVPSEGLYLIYSQVLFKGQGCPSTHVLLTHTISRIAVTYQTKVNLLSAIKSPCQRETPEGAEAKPWYEPIYLGGVFQLEKGDRLSAEINRPDYLDFAESGQVYFGIIAL

SEQ ID NO: 686 - protein, 157 aa, Artificial Sequence
  TNFR1-selective antagonist TNF mutein L29S
VRSSSRTPSDKPVAHVVANPQAEGQLQWSNRRANALLANGVELRDNQLVVPSEGLYLIYSQVLFKGQGCPSTHVLLTHTISRIAVSYQTKVNLLSAIKSPCQRETPEGAEAKPWYEPIYLGGVFQLEKGDRLSAEINRPDYLDFAESGQVYFGIIAL

SEQ ID NO: 687 - protein, 157 aa, Artificial Sequence
  TNFR1-selective antagonist TNF mutein L29G
VRSSSRTPSDKPVAHVVANPQAEGQLQWGNRRANALLANGVELRDNQLVVPSEGLYLIYSQVLFKGQGCPSTHVLLTHTISRIAVSYQTKVNLLSAIKSPCQRETPEGAEAKPWYEPIYLGGVFQLEKGDRLSAEINRPDYLDFAESGQVYFGIIAL

SEQ ID NO: 688 - protein, 157 aa, Artificial Sequence
  TNFR1-selective antagonistTNF mutein L29Y
VRSSSRTPSDKPVAHVVANPQAEGQLQWYNRRANALLANGVELRDNQLVVPSEGLYLIYSQVLFKGQGCPSTHVLLTHTISRIAVSYQTKVNLLSAIKSPCQRETPEGAEAKPWYEPIYLGGVFQLEKGDRLSAEINRPDYLDFAESGQVYFGIIAL

SEQ ID NO: 689 - protein, 157 aa, Artificial Sequence
  TNFR1-selective antagonist TNF mutein R31E
VRSSSRTPSDKPVAHVVANPQAEGQLQWLNERANALLANGVELRDNQLVVPSEGLYLIYSQVLFKGQGCPSTHVLLTHTISRIAVSYQTKVNLLSAIKSPCQRETPEGAEAKPWYEPIYLGGVFQLEKGDRLSAEINRPDYLDFAESGQVYFGIIAL

SEQ ID NO: 690 - protein, 157 aa, Artificial Sequence
  TNFR1-selective antagonist TNF mutein R31N
VRSSSRTPSDKPVAHVVANPQAEGQLQWLNNRANALLANGVELRDNQLVVPSEGLYLIYSQVLFKGQGCPSTHVLLTHTISRIAVSYQTKVNLLSAIKSPCQRETPEGAEAKPWYEPIYLGGVFQLEKGDRLSAEINRPDYLDFAESGQVYFGIIAL

SEQ ID NO: 691 - protein, 157 aa, Artificial Sequence
  TNFR1-selective antagonist TNF mutein R32W
VRSSSRTPSDKPVAHVVANPQAEGQLQWLNRWANALLANGVELRDNQLVVPSEGLYLIYSQVLFKGQGCPSTHVLLTHTISRIAVSYQTKVNLLSAIKSPCQRETPEGAEAKPWYEPIYLGGVFQLEKGDRLSAEINRPDYLDFAESGQVYFGIIAL

SEQ ID NO: 692 - protein, 157 aa, Artificial Sequence
  TNFR1-selective antagonist TNF mutein R32Y
VRSSSRTPSDKPVAHVVANPQAEGQLQWLNRYANALLANGVELRDNQLVVPSEGLYLIYSQVLFKGQGCPSTHVLLTHTISRIAVSYQTKVNLLSAIKSPCQRETPEGAEAKPWYEPIYLGGVFQLEKGDRLSAEINRPDYLDFAESGQVYFGIIAL

SEQ ID NO: 693 - protein, 157 aa, Artificial Sequence
  TNFR1-selective antagonist TNF mutein S86T
VRSSSRTPSDKPVAHVVANPQAEGQLQWLNRRANALLANGVELRDNQLVVPSEGLYLIYSQVLFKGQGCPSTHVLLTHTISRIAVTYQTKVNLLSAIKSPCQRETPEGAEAKPWYEPIYLGGVFQLEKGDRLSAEINRPDYLDFAESGQVYFGIIAL

SEQ ID NO: 694 - protein, 157 aa, Artificial Sequence
  TNFR1-selective antagonist TNF mutein R31N/R32T
VRSSSRTPSDKPVAHVVANPQAEGQLQWLNNTANALLANGVELRDNQLVVPSEGLYLIYSQVLFKGQGCPSTHVLLTHTISRIAVSYQTKVNLLSAIKSPCQRETPEGAEAKPWYEPIYLGGVFQLEKGDRLSAEINRPDYLDFAESGQVYFGIIAL

SEQ ID NO: 695 - protein, 157 aa, Artificial Sequence
  TNFR1-selective antagonist TNF mutein L29S/R32W
VRSSSRTPSDKPVAHVVANPQAEGQLQWSNRWANALLANGVELRDNQLVVPSEGLYLIYSQVLFKGQGCPSTHVLLTHTISRIAVSYQTKVNLLSAIKSPCQRETPEGAEAKPWYEPIYLGGVFQLEKGDRLSAEINRPDYLDFAESGQVYFGIIAL

SEQ ID NO: 696 - protein, 157 aa, Artificial Sequence
  TNFR1-selective antagonist TNF mutein L29S/S86T
VRSSSRTPSDKPVAHVVANPQAEGQLQWSNRRANALLANGVELRDNQLVVPSEGLYLIYSQVLFKGQGCPSTHVLLTHTISRIAVTYQTKVNLLSAIKSPCQRETPEGAEAKPWYEPIYLGGVFQLEKGDRLSAEINRPDYLDFAESGQVYFGIIAL

SEQ ID NO: 697 - protein, 157 aa, Artificial Sequence
  TNFR1-selective antagonist TNF mutein L29S/R32W/S86T
VRSSSRTPSDKPVAHVVANPQAEGQLQWSNRWANALLANGVELRDNQLVVPSEGLYLIYSQVLFKGQGCPSTHVLLTHTISRIAVTYQTKVNLLSAIKSPCQRETPEGAEAKPWYEPIYLGGVFQLEKGDRLSAEINRPDYLDFAESGQVYFGIIAL

SEQ ID NO: 698 - protein, 157 aa, Artificial Sequence
  TNFR1-selective antagonist TNF mutein R31E/S86T
VRSSSRTPSDKPVAHVVANPQAEGQLQWLNERANALLANGVELRDNQLVVPSEGLYLIYSQVLFKGQGCPSTHVLLTHTISRIAVTYQTKVNLLSAIKSPCQRETPEGAEAKPWYEPIYLGGVFQLEKGDRLSAEINRPDYLDFAESGQVYFGIIAL

SEQ ID NO: 699 - protein, 157 aa, Artificial Sequence
  TNFR1-selective antagonist TNF mutein R31N/R32T/S86T
VRSSSRTPSDKPVAHVVANPQAEGQLQWLNNTANALLANGVELRDNQLVVPSEGLYLIYSQVLFKGQGCPSTHVLLTHTISRIAVTYQTKVNLLSAIKSPCQRETPEGAEAKPWYEPIYLGGVFQLEKGDRLSAEINRPDYLDFAESGQVYFGIIAL

SEQ ID NO: 700 - protein, 157 aa, Artificial Sequence
  TNFR1-selective antagonist TNF mutein E146R
VRSSSRTPSDKPVAHVVANPQAEGQLQWLNRRANALLANGVELRDNQLVVPSEGLYLIYSQVLFKGQGCPSTHVLLTHTISRIAVSYQTKVNLLSAIKSPCQRETPEGAEAKPWYEPIYLGGVFQLEKGDRLSAEINRPDYLDFARSGQVYFGIIAL

SEQ ID NO: 701 - protein, 157 aa, Artificial Sequence
  XPro1595
MRSSSRTPSDKPVAHVVANPQAEGQLQWLNCRANALLANGVELRDNQLVVPSEGLYLIYSQVLFKGQGVPSTHVLLTHTISRIAVSHQTKVNLLSAIKSPAQRETPEGAEAKPWYEPIYLGGVFQLEKGDRLSAEINRPDYLDFRESGQVYFGIIAL

SEQ ID NO: 702 - protein, 157 aa, Artificial Sequence
  XENP345
VRSSSRTPSDKPVAHVVANPQAEGQLQWLNRRANALLANGVELRDNQLVVPSEGLYLIYSQVLFKGQGCPSTHVLLTHTISRIAVSYQTKVNLLSATKSPCQRETPEGAEAKPWYEPIYLGGVFQLEKGDRLSAEINRPDYLDFRESGQVYFGIIAL

SEQ ID NO: 703 - protein, 157 aa, Artificial Sequence
  R1antTNF
VRSSSRTPSDKPVAHVVANPQAEGQLQWLNRRANALLANGVELRDNQLVVPSEGLYLIYSQVLFKGQGCPSTHVLLTHTISRISTTHNQKVNLLSAIKSPCQRETPEGAEAKPWYEPIYLGGVFQLEKGDRLSAEINRPDYLDFAESGQVYFGIIAL

SEQ ID NO: 704 - protein, 242 aa, Artificial Sequence
  DOM1h-574-208 - albudAb fusion protein
EVQLLESGGGLVQPGGSLRLSCAASGFTFDKYSMGWVRQAPGKGLEWVSQISDTADRTYYAHAVKGRFTISRDNSKNTLYLQMNSLRAEDTAVYYCAIYTGRWVPFEYWGQGTLVTVSSGGGGSGGGGSGGGGSDIQMTQSPSSLSASVGDRVTITCRASRPIGTTLSWYQQKPGKAPKLLILWNSRLQSGVPSRFSGSGSGTDFTLTISSLQPEDFATYYCAQAGTHPTTFGQGTKVEIKR

SEQ ID NO: 705 - protein, 242 aa, Artificial Sequence
  DOM1h-131-206 dAb - albudAb fusion protein
EVQLLESGGGLVQPGGSLRLSCAASGFTFAHETMVWVRQAPGKGLEWVSHIPPDGQDPFYADSVKGRFTISRDNSKNTLYLQMNSLRAEDTAVYHCALLPKRGPWFDYWGQGTLVTVSSGGGGSGGGGSGGGGSDIQMTQSPSSLSASVGDRVTITCRASRPIGTTLSWYQQKPGKAPKLLILWNSRLQSGVPSRFSGSGSGTDFTLTISSLQPEDFATYYCAQAGTHPTTFGQGTKVEIKR

SEQ ID NO: 706 - protein, 466 aa, Artificial Sequence
  H398 scFv-SCDKTH-trastuzumab Fc fusion protein
QVQLQESGAELARPGASVKLSCKASGYTFTDFYINWVKQRTGQGLEWIGEIYPYSGHAYYNEKFKAKATLTADKSSSTAFMQLNSLTSEDSAVYFCVRWDFLDYWGQGTTLTVSSGGGGSGGGGSGGGGSDIVMTQSPLSLPVSLGDQASISCRSSQSLLHSNGNTYLHWYVQKPGQSPKLLIYTVSNRFSGVPDRFSGSGSGTDFTLKISRVEAEDLGVYFCSQSTHVPYTFGGGTKLEIKRSCDKTHAPELLGGPSVFLFPPKPKDTLMISRTPEVTCVVVDVSHEDPEVKFNWYVDGVEVHNAKTKPREEQYNSTYRVVSVLTVLHQDWLNGKEYKCKVSNKALPAPIEKTISKAKGQPREPQVYTLPPSREEMTKNQVSLTCLVKGFYPSDIAVEWESNGQPENNYKTTPPVLDSDGSFFLYSKLTVDKSRWQQGNVFSCSVMHEALHNHYTQKSLSLSPGK

SEQ ID NO: 707 - protein, 475 aa, Artificial Sequence
  H398 scFv-GGGGSGGGGSGGGGS-Trastuzumab Fc fusion protein
QVQLQESGAELARPGASVKLSCKASGYTFTDFYINWVKQRTGQGLEWIGEIYPYSGHAYYNEKFKAKATLTADKSSSTAFMQLNSLTSEDSAVYFCVRWDFLDYWGQGTTLTVSSGGGGSGGGGSGGGGSDIVMTQSPLSLPVSLGDQASISCRSSQSLLHSNGNTYLHWYVQKPGQSPKLLIYTVSNRFSGVPDRFSGSGSGTDFTLKISRVEAEDLGVYFCSQSTHVPYTFGGGTKLEIKRGGGGSGGGGSGGGGSAPELLGGPSVFLFPPKPKDTLMISRTPEVTCVVVDVSHEDPEVKFNWYVDGVEVHNAKTKPREEQYNSTYRVVSVLTVLHQDWLNGKEYKCKVSNKALPAPIEKTISKAKGQPREPQVYTLPPSREEMTKNQVSLTCLVKGFYPSDIAVEWESNGQPENNYKTTPPVLDSDGSFFLYSKLTVDKSRWQQGNVFSCSVMHEALHNHYTQKSLSLSPGK

SEQ ID NO: 708 - protein, 481 aa, Artificial Sequence
  H398 scFv-GGGGSGGGGSGGGGS-SCDKTH-Trastuzumab Fc fusion protein
QVQLQESGAELARPGASVKLSCKASGYTFTDFYINWVKQRTGQGLEWIGEIYPYSGHAYYNEKFKAKATLTADKSSSTAFMQLNSLTSEDSAVYFCVRWDFLDYWGQGTTLTVSSGGGGSGGGGSGGGGSDIVMTQSPLSLPVSLGDQASISCRSSQSLLHSNGNTYLHWYVQKPGQSPKLLIYTVSNRFSGVPDRFSGSGSGTDFTLKISRVEAEDLGVYFCSQSTHVPYTFGGGTKLEIKRGGGGSGGGGSGGGGSSCDKTHAPELLGGPSVFLFPPKPKDTLMISRTPEVTCVVVDVSHEDPEVKFNWYVDGVEVHNAKTKPREEQYNSTYRVVSVLTVLHQDWLNGKEYKCKVSNKALPAPIEKTISKAKGQPREPQVYTLPPSREEMTKNQVSLTCLVKGFYPSDIAVEWESNGQPENNYKTTPPVLDSDGSFFLYSKLTVDKSRWQQGNVFSCSVMHEALHNHYTQKSLSLSPGK

SEQ ID NO: 709 - protein, 849 aa, Artificial Sequence
  H398 scFv-GGGGSGGGGSGGGGS-HSA fusion protein
QVQLQESGAELARPGASVKLSCKASGYTFTDFYINWVKQRTGQGLEWIGEIYPYSGHAYYNEKFKAKATLTADKSSSTAFMQLNSLTSEDSAVYFCVRWDFLDYWGQGTTLTVSSGGGGSGGGGSGGGGSDIVMTQSPLSLPVSLGDQASISCRSSQSLLHSNGNTYLHWYVQKPGQSPKLLIYTVSNRFSGVPDRFSGSGSGTDFTLKISRVEAEDLGVYFCSQSTHVPYTFGGGTKLEIKRGGGGSGGGGSGGGGSRGVFRRDAHKSEVAHRFKDLGEENFKALVLIAFAQYLQQCPFEDHVKLVNEVTEFAKTCVADESAENCDKSLHTLFGDKLCTVATLRETYGEMADCCAKQEPERNECFLQHKDDNPNLPRLVRPEVDVMCTAFHDNEETFLKKYLYEIARRHPYFYAPELLFFAKRYKAAFTECCQAADKAACLLPKLDELRDEGKASSAKQRLKCASLQKFGERAFKAWAVARLSQRFPKAEFAEVSKLVTDLTKVHTECCHGDLLECADDRADLAKYICENQDSISSKLKECCEKPLLEKSHCIAEVENDEMPADLPSLAADFVESKDVCKNYAEAKDVFLGMFLYEYARRHPDYSVVLLLRLAKTYETTLEKCCAAADPHECYAKVFDEFKPLVEEPQNLIKQNCELFEQLGEYKFQNALLVRYTKKVPQVSTPTLVEVSRNLGKVGSKCCKHPEAKRMPCAEDYLSVVLNQLCVLHEKTPVSDRVTKCCTESLVNRRPCFSALEVDETYVPKEFNAETFTFHADICTLSEKERQIKKQTALVELVKHKPKATKEQLKAVMDDFAAFVEKCCKADDKETCFAEEGKKLVAASQAALGL

SEQ ID NO: 710 - protein, 342 aa, Artificial Sequence
  DOMlh-574-16-SCDKTH-Trastuzumab Fc fusion protein
EVQLLESGGGLVQPGGSLRLSCAASGFTFVKYSMGWVRQAPGKGPEWVSQISNTGDRTYYADSVKGRFTISRDNSKNTLYLQMNSLRAEDTAVYYCAIYTGRWEPFDYWGQGTLVTVSSSCDKTHAPELLGGPSVFLFPPKPKDTLMISRTPEVTCVVVDVSHEDPEVKFNWYVDGVEVHNAKTKPREEQYNSTYRVVSVLTVLHQDWLNGKEYKCKVSNKALPAPIEKTISKAKGQPREPQVYTLPPSREEMTKNQVSLTCLVKGFYPSDIAVEWESNGQPENNYKTTPPVLDSDGSFFLYSKLTVDKSRWQQGNVFSCSVMHEALHNHYTQKSLSLSPGK

SEQ ID NO: 711 - protein, 351 aa, Artificial Sequence
  DOMlh-574-16-GGGGSGGGGSGGGGS-Trastuzumab Fc fusion protein
EVQLLESGGGLVQPGGSLRLSCAASGFTFVKYSMGWVRQAPGKGPEWVSQISNTGDRTYYADSVKGRFTISRDNSKNTLYLQMNSLRAEDTAVYYCAIYTGRWEPFDYWGQGTLVTVSSGGGGSGGGGSGGGGSAPELLGGPSVFLFPPKPKDTLMISRTPEVTCVVVDVSHEDPEVKFNWYVDGVEVHNAKTKPREEQYNSTYRVVSVLTVLHQDWLNGKEYKCKVSNKALPAPIEKTISKAKGQPREPQVYTLPPSREEMTKNQVSLTCLVKGFYPSDIAVEWESNGQPENNYKTTPPVLDSDGSFFLYSKLTVDKSRWQQGNVFSCSVMHEALHNHYTQKSLSLSPGK

SEQ ID NO: 712 - protein, 357 aa, Artificial Sequence
  DOMlh-574-16-GGGGSGGGGSGGGGS-SCDKTH-Trastuzumab Fc fusion protein
EVQLLESGGGLVQPGGSLRLSCAASGFTFVKYSMGWVRQAPGKGPEWVSQISNTGDRTYYADSVKGRFTISRDNSKNTLYLQMNSLRAEDTAVYYCAIYTGRWEPFDYWGQGTLVTVSSGGGGSGGGGSGGGGSSCDKTHAPELLGGPSVFLFPPKPKDTLMISRTPEVTCVVVDVSHEDPEVKFNWYVDGVEVHNAKTKPREEQYNSTYRVVSVLTVLHQDWLNGKEYKCKVSNKALPAPIEKTISKAKGQPREPQVYTLPPSREEMTKNQVSLTCLVKGFYPSDIAVEWESNGQPENNYKTTPPVLDSDGSFFLYSKLTVDKSRWQQGNVFSCSVMHEALHNHYTQKSLSLSPGK

SEQ ID NO: 713 - protein, 725 aa, Artificial Sequence
  DOMlh-574-16-GGGGSGGGGSGGGGS-HSA fusion protein
EVQLLESGGGLVQPGGSLRLSCAASGFTFVKYSMGWVRQAPGKGPEWVSQISNTGDRTYYADSVKGRFTISRDNSKNTLYLQMNSLRAEDTAVYYCAIYTGRWEPFDYWGQGTLVTVSSGGGGSGGGGSGGGGSRGVFRRDAHKSEVAHRFKDLGEENFKALVLIAFAQYLQQCPFEDHVKLVNEVTEFAKTCVADESAENCDKSLHTLFGDKLCTVATLRETYGEMADCCAKQEPERNECFLQHKDDNPNLPRLVRPEVDVMCTAFHDNEETFLKKYLYEIARRHPYFYAPELLFFAKRYKAAFTECCQAADKAACLLPKLDELRDEGKASSAKQRLKCASLQKFGERAFKAWAVARLSQRFPKAEFAEVSKLVTDLTKVHTECCHGDLLECADDRADLAKYICENQDSISSKLKECCEKPLLEKSHCIAEVENDEMPADLPSLAADFVESKDVCKNYAEAKDVFLGMFLYEYARRHPDYSVVLLLRLAKTYETTLEKCCAAADPHECYAKVFDEFKPLVEEPQNLIKQNCELFEQLGEYKFQNALLVRYTKKVPQVSTPTLVEVSRNLGKVGSKCCKHPEAKRMPCAEDYLSVVLNQLCVLHEKTPVSDRVTKCCTESLVNRRPCFSALEVDETYVPKEFNAETFTFHADICTLSEKERQIKKQTALVELVKHKPKATKEQLKAVMDDFAAFVEKCCKADDKETCFAEEGKKLVAASQAALGL

SEQ ID NO: 714 - protein, 342 aa, Artificial Sequence
  DOMlh-549-SCDKTH-Trastuzumab Fc fusion protein
EVQLLESGGGLVQPGGSLRLSCAASGFTFVDYEMHWVRQAPGKGLEWVSSISESGTTTYYADSVKGRFTISRDNSKNTLYLQMNSLRAEDTAVYYCAKRRFSASTFDYWGQGTLVTVSSSCDKTHAPELLGGPSVFLFPPKPKDTLMISRTPEVTCVVVDVSHEDPEVKFNWYVDGVEVHNAKTKPREEQYNSTYRVVSVLTVLHQDWLNGKEYKCKVSNKALPAPIEKTISKAKGQPREPQVYTLPPSREEMTKNQVSLTCLVKGFYPSDIAVEWESNGQPENNYKTTPPVLDSDGSFFLYSKLTVDKSRWQQGNVFSCSVMHEALHNHYTQKSLSLSPGK

SEQ ID NO: 715 - protein, 351 aa, Artificial Sequence
  DOMlh-549-GGGGSGGGGSGGGGS-Trastuzumab Fc fusion protein
EVQLLESGGGLVQPGGSLRLSCAASGFTFVDYEMHWVRQAPGKGLEWVSSISESGTTTYYADSVKGRFTISRDNSKNTLYLQMNSLRAEDTAVYYCAKRRFSASTFDYWGQGTLVTVSSGGGGSGGGGSGGGGSAPELLGGPSVFLFPPKPKDTLMISRTPEVTCVVVDVSHEDPEVKFNWYVDGVEVHNAKTKPREEQYNSTYRVVSVLTVLHQDWLNGKEYKCKVSNKALPAPIEKTISKAKGQPREPQVYTLPPSREEMTKNQVSLTCLVKGFYPSDIAVEWESNGQPENNYKTTPPVLDSDGSFFLYSKLTVDKSRWQQGNVFSCSVMHEALHNHYTQKSLSLSPGK

SEQ ID NO: 716 - protein, 357 aa, Artificial Sequence
  DOMlh-549-GGGGSGGGGSGGGGS-SCDKTH-Trastuzumab Fc fusion protein
EVQLLESGGGLVQPGGSLRLSCAASGFTFVDYEMHWVRQAPGKGLEWVSSISESGTTTYYADSVKGRFTISRDNSKNTLYLQMNSLRAEDTAVYYCAKRRFSASTFDYWGQGTLVTVSSGGGGSGGGGSGGGGSSCDKTHAPELLGGPSVFLFPPKPKDTLMISRTPEVTCVVVDVSHEDPEVKFNWYVDGVEVHNAKTKPREEQYNSTYRVVSVLTVLHQDWLNGKEYKCKVSNKALPAPIEKTISKAKGQPREPQVYTLPPSREEMTKNQVSLTCLVKGFYPSDIAVEWESNGQPENNYKTTPPVLDSDGSFFLYSKLTVDKSRWQQGNVFSCSVMHEALHNHYTQKSLSLSPGK

SEQ ID NO: 717 - protein, 725 aa, Artificial Sequence
  DOMlh-549-GGGGSGGGGSGGGGS-HSA fusion protein
EVQLLESGGGLVQPGGSLRLSCAASGFTFVDYEMHWVRQAPGKGLEWVSSISESGTTTYYADSVKGRFTISRDNSKNTLYLQMNSLRAEDTAVYYCAKRRFSASTFDYWGQGTLVTVSSGGGGSGGGGSGGGGSRGVFRRDAHKSEVAHRFKDLGEENFKALVLIAFAQYLQQCPFEDHVKLVNEVTEFAKTCVADESAENCDKSLHTLFGDKLCTVATLRETYGEMADCCAKQEPERNECFLQHKDDNPNLPRLVRPEVDVMCTAFHDNEETFLKKYLYEIARRHPYFYAPELLFFAKRYKAAFTECCQAADKAACLLPKLDELRDEGKASSAKQRLKCASLQKFGERAFKAWAVARLSQRFPKAEFAEVSKLVTDLTKVHTECCHGDLLECADDRADLAKYICENQDSISSKLKECCEKPLLEKSHCIAEVENDEMPADLPSLAADFVESKDVCKNYAEAKDVFLGMFLYEYARRHPDYSVVLLLRLAKTYETTLEKCCAAADPHECYAKVFDEFKPLVEEPQNLIKQNCELFEQLGEYKFQNALLVRYTKKVPQVSTPTLVEVSRNLGKVGSKCCKHPEAKRMPCAEDYLSVVLNQLCVLHEKTPVSDRVTKCCTESLVNRRPCFSALEVDETYVPKEFNAETFTFHADICTLSEKERQIKKQTALVELVKHKPKATKEQLKAVMDDFAAFVEKCCKADDKETCFAEEGKKLVAASQAALGL

SEQ ID NO: 718 - protein, 342 aa, Artificial Sequence
  DOM1h-574-208-SCDKTH-Trastuzumab Fc fusion protein
EVQLLESGGGLVQPGGSLRLSCAASGFTFDKYSMGWVRQAPGKGLEWVSQISDTADRTYYAHAVKGRFTISRDNSKNTLYLQMNSLRAEDTAVYYCAIYTGRWVPFEYWGQGTLVTVSSSCDKTHAPELLGGPSVFLFPPKPKDTLMISRTPEVTCVVVDVSHEDPEVKFNWYVDGVEVHNAKTKPREEQYNSTYRVVSVLTVLHQDWLNGKEYKCKVSNKALPAPIEKTISKAKGQPREPQVYTLPPSREEMTKNQVSLTCLVKGFYPSDIAVEWESNGQPENNYKTTPPVLDSDGSFFLYSKLTVDKSRWQQGNVFSCSVMHEALHNHYTQKSLSLSPGK

SEQ ID NO: 719 - protein, 351 aa, Artificial Sequence
  DOM1h-574-208-GGGGSGGGGSGGGGS-Trastuzumab Fc fusion protein
EVQLLESGGGLVQPGGSLRLSCAASGFTFDKYSMGWVRQAPGKGLEWVSQISDTADRTYYAHAVKGRFTISRDNSKNTLYLQMNSLRAEDTAVYYCAIYTGRWVPFEYWGQGTLVTVSSGGGGSGGGGSGGGGSAPELLGGPSVFLFPPKPKDTLMISRTPEVTCVVVDVSHEDPEVKFNWYVDGVEVHNAKTKPREEQYNSTYRVVSVLTVLHQDWLNGKEYKCKVSNKALPAPIEKTISKAKGQPREPQVYTLPPSREEMTKNQVSLTCLVKGFYPSDIAVEWESNGQPENNYKTTPPVLDSDGSFFLYSKLTVDKSRWQQGNVFSCSVMHEALHNHYTQKSLSLSPGK

SEQ ID NO: 720 - protein, 357 aa, Artificial Sequence
  DOM1h-574-208-GGGGSGGGGSGGGGS-SCDKTH-Trastuzumab Fc fusion protein
EVQLLESGGGLVQPGGSLRLSCAASGFTFDKYSMGWVRQAPGKGLEWVSQISDTADRTYYAHAVKGRFTISRDNSKNTLYLQMNSLRAEDTAVYYCAIYTGRWVPFEYWGQGTLVTVSSGGGGSGGGGSGGGGSSCDKTHAPELLGGPSVFLFPPKPKDTLMISRTPEVTCVVVDVSHEDPEVKFNWYVDGVEVHNAKTKPREEQYNSTYRVVSVLTVLHQDWLNGKEYKCKVSNKALPAPIEKTISKAKGQPREPQVYTLPPSREEMTKNQVSLTCLVKGFYPSDIAVEWESNGQPENNYKTTPPVLDSDGSFFLYSKLTVDKSRWQQGNVFSCSVMHEALHNHYTQKSLSLSPGK

SEQ ID NO: 721 - protein, 725 aa, Artificial Sequence
  DOM1h-574-208-GGGGSGGGGSGGGGS-HSA fusion protein
EVQLLESGGGLVQPGGSLRLSCAASGFTFDKYSMGWVRQAPGKGLEWVSQISDTADRTYYAHAVKGRFTISRDNSKNTLYLQMNSLRAEDTAVYYCAIYTGRWVPFEYWGQGTLVTVSSGGGGSGGGGSGGGGSRGVFRRDAHKSEVAHRFKDLGEENFKALVLIAFAQYLQQCPFEDHVKLVNEVTEFAKTCVADESAENCDKSLHTLFGDKLCTVATLRETYGEMADCCAKQEPERNECFLQHKDDNPNLPRLVRPEVDVMCTAFHDNEETFLKKYLYEIARRHPYFYAPELLFFAKRYKAAFTECCQAADKAACLLPKLDELRDEGKASSAKQRLKCASLQKFGERAFKAWAVARLSQRFPKAEFAEVSKLVTDLTKVHTECCHGDLLECADDRADLAKYICENQDSISSKLKECCEKPLLEKSHCIAEVENDEMPADLPSLAADFVESKDVCKNYAEAKDVFLGMFLYEYARRHPDYSVVLLLRLAKTYETTLEKCCAAADPHECYAKVFDEFKPLVEEPQNLIKQNCELFEQLGEYKFQNALLVRYTKKVPQVSTPTLVEVSRNLGKVGSKCCKHPEAKRMPCAEDYLSVVLNQLCVLHEKTPVSDRVTKCCTESLVNRRPCFSALEVDETYVPKEFNAETFTFHADICTLSEKERQIKKQTALVELVKHKPKATKEQLKAVMDDFAAFVEKCCKADDKETCFAEEGKKLVAASQAALGL

SEQ ID NO: 722 - protein, 342 aa, Artificial Sequence
  DOM1h-131-206-SCDKTH-Trastuzumab Fc fusion protein
EVQLLESGGGLVQPGGSLRLSCAASGFTFAHETMVWVRQAPGKGLEWVSHIPPDGQDPFYADSVKGRFTISRDNSKNTLYLQMNSLRAEDTAVYHCALLPKRGPWFDYWGQGTLVTVSSSCDKTHAPELLGGPSVFLFPPKPKDTLMISRTPEVTCVVVDVSHEDPEVKFNWYVDGVEVHNAKTKPREEQYNSTYRVVSVLTVLHQDWLNGKEYKCKVSNKALPAPIEKTISKAKGQPREPQVYTLPPSREEMTKNQVSLTCLVKGFYPSDIAVEWESNGQPENNYKTTPPVLDSDGSFFLYSKLTVDKSRWQQGNVFSCSVMHEALHNHYTQKSLSLSPGK

SEQ ID NO: 723 - protein, 351 aa, Artificial Sequence
  DOM1h-131-206-GGGGSGGGGSGGGGS-Trastuzumab Fc fusion protein
EVQLLESGGGLVQPGGSLRLSCAASGFTFAHETMVWVRQAPGKGLEWVSHIPPDGQDPFYADSVKGRFTISRDNSKNTLYLQMNSLRAEDTAVYHCALLPKRGPWFDYWGQGTLVTVSSGGGGSGGGGSGGGGSAPELLGGPSVFLFPPKPKDTLMISRTPEVTCVVVDVSHEDPEVKFNWYVDGVEVHNAKTKPREEQYNSTYRVVSVLTVLHQDWLNGKEYKCKVSNKALPAPIEKTISKAKGQPREPQVYTLPPSREEMTKNQVSLTCLVKGFYPSDIAVEWESNGQPENNYKTTPPVLDSDGSFFLYSKLTVDKSRWQQGNVFSCSVMHEALHNHYTQKSLSLSPGK

SEQ ID NO: 724 - protein, 357 aa, Artificial Sequence
  DOM1h-131-206-GGGGSGGGGSGGGGS-SCDKTH-Trastuzumab Fc fusion protein
EVQLLESGGGLVQPGGSLRLSCAASGFTFAHETMVWVRQAPGKGLEWVSHIPPDGQDPFYADSVKGRFTISRDNSKNTLYLQMNSLRAEDTAVYHCALLPKRGPWFDYWGQGTLVTVSSGGGGSGGGGSGGGGSSCDKTHAPELLGGPSVFLFPPKPKDTLMISRTPEVTCVVVDVSHEDPEVKFNWYVDGVEVHNAKTKPREEQYNSTYRVVSVLTVLHQDWLNGKEYKCKVSNKALPAPIEKTISKAKGQPREPQVYTLPPSREEMTKNQVSLTCLVKGFYPSDIAVEWESNGQPENNYKTTPPVLDSDGSFFLYSKLTVDKSRWQQGNVFSCSVMHEALHNHYTQKSLSLSPGK

SEQ ID NO: 725 - protein, 725 aa, Artificial Sequence
  DOM1h-131-206-GGGGSGGGGSGGGGS-HSA fusion protein
EVQLLESGGGLVQPGGSLRLSCAASGFTFAHETMVWVRQAPGKGLEWVSHIPPDGQDPFYADSVKGRFTISRDNSKNTLYLQMNSLRAEDTAVYHCALLPKRGPWFDYWGQGTLVTVSSGGGGSGGGGSGGGGSRGVFRRDAHKSEVAHRFKDLGEENFKALVLIAFAQYLQQCPFEDHVKLVNEVTEFAKTCVADESAENCDKSLHTLFGDKLCTVATLRETYGEMADCCAKQEPERNECFLQHKDDNPNLPRLVRPEVDVMCTAFHDNEETFLKKYLYEIARRHPYFYAPELLFFAKRYKAAFTECCQAADKAACLLPKLDELRDEGKASSAKQRLKCASLQKFGERAFKAWAVARLSQRFPKAEFAEVSKLVTDLTKVHTECCHGDLLECADDRADLAKYICENQDSISSKLKECCEKPLLEKSHCIAEVENDEMPADLPSLAADFVESKDVCKNYAEAKDVFLGMFLYEYARRHPDYSVVLLLRLAKTYETTLEKCCAAADPHECYAKVFDEFKPLVEEPQNLIKQNCELFEQLGEYKFQNALLVRYTKKVPQVSTPTLVEVSRNLGKVGSKCCKHPEAKRMPCAEDYLSVVLNQLCVLHEKTPVSDRVTKCCTESLVNRRPCFSALEVDETYVPKEFNAETFTFHADICTLSEKERQIKKQTALVELVKHKPKATKEQLKAVMDDFAAFVEKCCKADDKETCFAEEGKKLVAASQAALGL

SEQ ID NO: 726 - protein, 472 aa, Artificial Sequence
  H398 scFv-ESKYGPPCPPCP-Nivolumab Fc fusion protein
QVQLQESGAELARPGASVKLSCKASGYTFTDFYINWVKQRTGQGLEWIGEIYPYSGHAYYNEKFKAKATLTADKSSSTAFMQLNSLTSEDSAVYFCVRWDFLDYWGQGTTLTVSSGGGGSGGGGSGGGGSDIVMTQSPLSLPVSLGDQASISCRSSQSLLHSNGNTYLHWYVQKPGQSPKLLIYTVSNRFSGVPDRFSGSGSGTDFTLKISRVEAEDLGVYFCSQSTHVPYTFGGGTKLEIKRESKYGPPCPPCPAPEFLGGPSVFLFPPKPKDTLMISRTPEVTCVVVDVSQEDPEVQFNWYVDGVEVHNAKTKPREEQFNSTYRVVSVLTVLHQDWLNGKEYKCKVSNKGLPSSIEKTISKAKGQPREPQVYTLPPSQEEMTKNQVSLTCLVKGFYPSDIAVEWESNGQPENNYKTTPPVLDSDGSFFLYSRLTVDKSRWQEGNVFSCSVMHEALHNHYTQKSLSLSLGK

SEQ ID NO: 727 - protein, 475 aa, Artificial Sequence
  H398 scFv-GGGGSGGGGSGGGGS-Nivolumab Fc fusion protein
QVQLQESGAELARPGASVKLSCKASGYTFTDFYINWVKQRTGQGLEWIGEIYPYSGHAYYNEKFKAKATLTADKSSSTAFMQLNSLTSEDSAVYFCVRWDFLDYWGQGTTLTVSSGGGGSGGGGSGGGGSDIVMTQSPLSLPVSLGDQASISCRSSQSLLHSNGNTYLHWYVQKPGQSPKLLIYTVSNRFSGVPDRFSGSGSGTDFTLKISRVEAEDLGVYFCSQSTHVPYTFGGGTKLEIKRGGGGSGGGGSGGGGSAPEFLGGPSVFLFPPKPKDTLMISRTPEVTCVVVDVSQEDPEVQFNWYVDGVEVHNAKTKPREEQFNSTYRVVSVLTVLHQDWLNGKEYKCKVSNKGLPSSIEKTISKAKGQPREPQVYTLPPSQEEMTKNQVSLTCLVKGFYPSDIAVEWESNGQPENNYKTTPPVLDSDGSFFLYSRLTVDKSRWQEGNVFSCSVMHEALHNHYTQKSLSLSLGK

SEQ ID NO: 728 - protein, 487 aa, Artificial Sequence
  H398 scFv-GGGGSGGGGSGGGGS-ESKYGPPCPPCP-Nivolumab Fc fusion protein
QVQLQESGAELARPGASVKLSCKASGYTFTDFYINWVKQRTGQGLEWIGEIYPYSGHAYYNEKFKAKATLTADKSSSTAFMQLNSLTSEDSAVYFCVRWDFLDYWGQGTTLTVSSGGGGSGGGGSGGGGSDIVMTQSPLSLPVSLGDQASISCRSSQSLLHSNGNTYLHWYVQKPGQSPKLLIYTVSNRFSGVPDRFSGSGSGTDFTLKISRVEAEDLGVYFCSQSTHVPYTFGGGTKLEIKRGGGGSGGGGSGGGGSESKYGPPCPPCPAPEFLGGPSVFLFPPKPKDTLMISRTPEVTCVVVDVSQEDPEVQFNWYVDGVEVHNAKTKPREEQFNSTYRVVSVLTVLHQDWLNGKEYKCKVSNKGLPSSIEKTISKAKGQPREPQVYTLPPSQEEMTKNQVSLTCLVKGFYPSDIAVEWESNGQPENNYKTTPPVLDSDGSFFLYSRLTVDKSRWQEGNVFSCSVMHEALHNHYTQKSLSLSLGK

SEQ ID NO: 729 - protein, 348 aa, Artificial Sequence
  DOMlh-574-16-ESKYGPPCPPCP-Nivolumab Fc fusion protein
EVQLLESGGGLVQPGGSLRLSCAASGFTFVKYSMGWVRQAPGKGPEWVSQISNTGDRTYYADSVKGRFTISRDNSKNTLYLQMNSLRAEDTAVYYCAIYTGRWEPFDYWGQGTLVTVSSESKYGPPCPPCPAPEFLGGPSVFLFPPKPKDTLMISRTPEVTCVVVDVSQEDPEVQFNWYVDGVEVHNAKTKPREEQFNSTYRVVSVLTVLHQDWLNGKEYKCKVSNKGLPSSIEKTISKAKGQPREPQVYTLPPSQEEMTKNQVSLTCLVKGFYPSDIAVEWESNGQPENNYKTTPPVLDSDGSFFLYSRLTVDKSRWQEGNVFSCSVMHEALHNHYTQKSLSLSLGK

SEQ ID NO: 730 - protein, 351 aa, Artificial Sequence
  DOMlh-574-16-GGGGSGGGGSGGGGS-Nivolumab Fc fusion protein
EVQLLESGGGLVQPGGSLRLSCAASGFTFVKYSMGWVRQAPGKGPEWVSQISNTGDRTYYADSVKGRFTISRDNSKNTLYLQMNSLRAEDTAVYYCAIYTGRWEPFDYWGQGTLVTVSSGGGGSGGGGSGGGGSAPEFLGGPSVFLFPPKPKDTLMISRTPEVTCVVVDVSQEDPEVQFNWYVDGVEVHNAKTKPREEQFNSTYRVVSVLTVLHQDWLNGKEYKCKVSNKGLPSSIEKTISKAKGQPREPQVYTLPPSQEEMTKNQVSLTCLVKGFYPSDIAVEWESNGQPENNYKTTPPVLDSDGSFFLYSRLTVDKSRWQEGNVFSCSVMHEALHNHYTQKSLSLSLGK

SEQ ID NO: 731 - protein, 363 aa, Artificial Sequence
  DOMlh-574-16-GGGGSGGGGSGGGGS-ESKYGPPCPPCP-Nivoluma b Fc fusion protein
EVQLLESGGGLVQPGGSLRLSCAASGFTFVKYSMGWVRQAPGKGPEWVSQISNTGDRTYYADSVKGRFTISRDNSKNTLYLQMNSLRAEDTAVYYCAIYTGRWEPFDYWGQGTLVTVSSGGGGSGGGGSGGGGSESKYGPPCPPCPAPEFLGGPSVFLFPPKPKDTLMISRTPEVTCVVVDVSQEDPEVQFNWYVDGVEVHNAKTKPREEQFNSTYRVVSVLTVLHQDWLNGKEYKCKVSNKGLPSSIEKTISKAKGQPREPQVYTLPPSQEEMTKNQVSLTCLVKGFYPSDIAVEWESNGQPENNYKTTPPVLDSDGSFFLYSRLTVDKSRWQEGNVFSCSVMHEALHNHYTQKSLSLSLGK

SEQ ID NO: 732 - protein, 348 aa, Artificial Sequence
  DOMlh-549-ESKYGPPCPPCP-Nivolumab Fc fusion protein
EVQLLESGGGLVQPGGSLRLSCAASGFTFVDYEMHWVRQAPGKGLEWVSSISESGTTTYYADSVKGRFTISRDNSKNTLYLQMNSLRAEDTAVYYCAKRRFSASTFDYWGQGTLVTVSSESKYGPPCPPCPAPEFLGGPSVFLFPPKPKDTLMISRTPEVTCVVVDVSQEDPEVQFNWYVDGVEVHNAKTKPREEQFNSTYRVVSVLTVLHQDWLNGKEYKCKVSNKGLPSSIEKTISKAKGQPREPQVYTLPPSQEEMTKNQVSLTCLVKGFYPSDIAVEWESNGQPENNYKTTPPVLDSDGSFFLYSRLTVDKSRWQEGNVFSCSVMHEALHNHYTQKSLSLSLGK

SEQ ID NO: 733 - protein, 351 aa, Artificial Sequence
  DOMlh-549-GGGGSGGGGSGGGGS-Nivolumab Fc fusion protein
EVQLLESGGGLVQPGGSLRLSCAASGFTFVDYEMHWVRQAPGKGLEWVSSISESGTTTYYADSVKGRFTISRDNSKNTLYLQMNSLRAEDTAVYYCAKRRFSASTFDYWGQGTLVTVSSGGGGSGGGGSGGGGSAPEFLGGPSVFLFPPKPKDTLMISRTPEVTCVVVDVSQEDPEVQFNWYVDGVEVHNAKTKPREEQFNSTYRVVSVLTVLHQDWLNGKEYKCKVSNKGLPSSIEKTISKAKGQPREPQVYTLPPSQEEMTKNQVSLTCLVKGFYPSDIAVEWESNGQPENNYKTTPPVLDSDGSFFLYSRLTVDKSRWQEGNVFSCSVMHEALHNHYTQKSLSLSLGK

SEQ ID NO: 734 - protein, 363 aa, Artificial Sequence
  DOMlh-549-GGGGSGGGGSGGGGS-ESKYGPPCPPCP-Nivolumab Fc fusion protein
EVQLLESGGGLVQPGGSLRLSCAASGFTFVDYEMHWVRQAPGKGLEWVSSISESGTTTYYADSVKGRFTISRDNSKNTLYLQMNSLRAEDTAVYYCAKRRFSASTFDYWGQGTLVTVSSGGGGSGGGGSGGGGSESKYGPPCPPCPAPEFLGGPSVFLFPPKPKDTLMISRTPEVTCVVVDVSQEDPEVQFNWYVDGVEVHNAKTKPREEQFNSTYRVVSVLTVLHQDWLNGKEYKCKVSNKGLPSSIEKTISKAKGQPREPQVYTLPPSQEEMTKNQVSLTCLVKGFYPSDIAVEWESNGQPENNYKTTPPVLDSDGSFFLYSRLTVDKSRWQEGNVFSCSVMHEALHNHYTQKSLSLSLGK

SEQ ID NO: 735 - protein, 348 aa, Artificial Sequence
  DOM1h-574-208-ESKYGPPCPPCP-Nivolumab Fc fusion protein
EVQLLESGGGLVQPGGSLRLSCAASGFTFDKYSMGWVRQAPGKGLEWVSQISDTADRTYYAHAVKGRFTISRDNSKNTLYLQMNSLRAEDTAVYYCAIYTGRWVPFEYWGQGTLVTVSSESKYGPPCPPCPAPEFLGGPSVFLFPPKPKDTLMISRTPEVTCVVVDVSQEDPEVQFNWYVDGVEVHNAKTKPREEQFNSTYRVVSVLTVLHQDWLNGKEYKCKVSNKGLPSSIEKTISKAKGQPREPQVYTLPPSQEEMTKNQVSLTCLVKGFYPSDIAVEWESNGQPENNYKTTPPVLDSDGSFFLYSRLTVDKSRWQEGNVFSCSVMHEALHNHYTQKSLSLSLGK

SEQ ID NO: 736 - protein, 351 aa, Artificial Sequence
  DOM1h-574-208-GGGGSGGGGSGGGGS-Nivolumab Fc fusion protein
EVQLLESGGGLVQPGGSLRLSCAASGFTFDKYSMGWVRQAPGKGLEWVSQISDTADRTYYAHAVKGRFTISRDNSKNTLYLQMNSLRAEDTAVYYCAIYTGRWVPFEYWGQGTLVTVSSGGGGSGGGGSGGGGSAPEFLGGPSVFLFPPKPKDTLMISRTPEVTCVVVDVSQEDPEVQFNWYVDGVEVHNAKTKPREEQFNSTYRVVSVLTVLHQDWLNGKEYKCKVSNKGLPSSIEKTISKAKGQPREPQVYTLPPSQEEMTKNQVSLTCLVKGFYPSDIAVEWESNGQPENNYKTTPPVLDSDGSFFLYSRLTVDKSRWQEGNVFSCSVMHEALHNHYTQKSLSLSLGK

SEQ ID NO: 737 - protein, 363 aa, Artificial Sequence
  DOM1h-574-208-GGGGSGGGGSGGGGS-ESKYGPPCPPCP-Nivolum ab Fc fusion protein
EVQLLESGGGLVQPGGSLRLSCAASGFTFDKYSMGWVRQAPGKGLEWVSQISDTADRTYYAHAVKGRFTISRDNSKNTLYLQMNSLRAEDTAVYYCAIYTGRWVPFEYWGQGTLVTVSSGGGGSGGGGSGGGGSESKYGPPCPPCPAPEFLGGPSVFLFPPKPKDTLMISRTPEVTCVVVDVSQEDPEVQFNWYVDGVEVHNAKTKPREEQFNSTYRVVSVLTVLHQDWLNGKEYKCKVSNKGLPSSIEKTISKAKGQPREPQVYTLPPSQEEMTKNQVSLTCLVKGFYPSDIAVEWESNGQPENNYKTTPPVLDSDGSFFLYSRLTVDKSRWQEGNVFSCSVMHEALHNHYTQKSLSLSLGK

SEQ ID NO: 738 - protein, 348 aa, Artificial Sequence
  DOM1h-131-206-ESKYGPPCPPCP-Nivolumab Fc fusion protein
EVQLLESGGGLVQPGGSLRLSCAASGFTFAHETMVWVRQAPGKGLEWVSHIPPDGQDPFYADSVKGRFTISRDNSKNTLYLQMNSLRAEDTAVYHCALLPKRGPWFDYWGQGTLVTVSSESKYGPPCPPCPAPEFLGGPSVFLFPPKPKDTLMISRTPEVTCVVVDVSQEDPEVQFNWYVDGVEVHNAKTKPREEQFNSTYRVVSVLTVLHQDWLNGKEYKCKVSNKGLPSSIEKTISKAKGQPREPQVYTLPPSQEEMTKNQVSLTCLVKGFYPSDIAVEWESNGQPENNYKTTPPVLDSDGSFFLYSRLTVDKSRWQEGNVFSCSVMHEALHNHYTQKSLSLSLGK

SEQ ID NO: 739 - protein, 351 aa, Artificial Sequence
  DOM1h-131-206-GGGGSGGGGSGGGGS-Nivolumab Fc fusion protein
EVQLLESGGGLVQPGGSLRLSCAASGFTFAHETMVWVRQAPGKGLEWVSHIPPDGQDPFYADSVKGRFTISRDNSKNTLYLQMNSLRAEDTAVYHCALLPKRGPWFDYWGQGTLVTVSSGGGGSGGGGSGGGGSAPEFLGGPSVFLFPPKPKDTLMISRTPEVTCVVVDVSQEDPEVQFNWYVDGVEVHNAKTKPREEQFNSTYRVVSVLTVLHQDWLNGKEYKCKVSNKGLPSSIEKTISKAKGQPREPQVYTLPPSQEEMTKNQVSLTCLVKGFYPSDIAVEWESNGQPENNYKTTPPVLDSDGSFFLYSRLTVDKSRWQEGNVFSCSVMHEALHNHYTQKSLSLSLGK

SEQ ID NO: 740 - protein, 363 aa, Artificial Sequence
  DOM1h-131-206-GGGGSGGGGSGGGGS-ESKYGPPCPPCP-Nivolum ab Fc fusion protein
EVQLLESGGGLVQPGGSLRLSCAASGFTFAHETMVWVRQAPGKGLEWVSHIPPDGQDPFYADSVKGRFTISRDNSKNTLYLQMNSLRAEDTAVYHCALLPKRGPWFDYWGQGTLVTVSSGGGGSGGGGSGGGGSESKYGPPCPPCPAPEFLGGPSVFLFPPKPKDTLMISRTPEVTCVVVDVSQEDPEVQFNWYVDGVEVHNAKTKPREEQFNSTYRVVSVLTVLHQDWLNGKEYKCKVSNKGLPSSIEKTISKAKGQPREPQVYTLPPSQEEMTKNQVSLTCLVKGFYPSDIAVEWESNGQPENNYKTTPPVLDSDGSFFLYSRLTVDKSRWQEGNVFSCSVMHEALHNHYTQKSLSLSLGK

SEQ ID NO: 741 - protein, 380 aa, Artificial Sequence
  TNF(R32W/S86T)-SCDKTH-Trastuzumab Fc fusion protein
VRSSSRTPSDKPVAHVVANPQAEGQLQWLNRWANALLANGVELRDNQLVVPSEGLYLIYSQVLFKGQGCPSTHVLLTHTISRIAVTYQTKVNLLSAIKSPCQRETPEGAEAKPWYEPIYLGGVFQLEKGDRLSAEINRPDYLDFAESGQVYFGIIALSCDKTHAPELLGGPSVFLFPPKPKDTLMISRTPEVTCVVVDVSHEDPEVKFNWYVDGVEVHNAKTKPREEQYNSTYRVVSVLTVLHQDWLNGKEYKCKVSNKALPAPIEKTISKAKGQPREPQVYTLPPSREEMTKNQVSLTCLVKGFYPSDIAVEWESNGQPENNYKTTPPVLDSDGSFFLYSKLTVDKSRWQQGNVFSCSVMHEALHNHYTQKSLSLSPGK

SEQ ID NO: 742 - protein, 389 aa, Artificial Sequence
  TNF(R32W/S86T)-GGGGSGGGGSGGGGS-Trastuzumab Fc fusion protein
VRSSSRTPSDKPVAHVVANPQAEGQLQWLNRWANALLANGVELRDNQLVVPSEGLYLIYSQVLFKGQGCPSTHVLLTHTISRIAVTYQTKVNLLSAIKSPCQRETPEGAEAKPWYEPIYLGGVFQLEKGDRLSAEINRPDYLDFAESGQVYFGIIALGGGGSGGGGSGGGGSAPELLGGPSVFLFPPKPKDTLMISRTPEVTCVVVDVSHEDPEVKFNWYVDGVEVHNAKTKPREEQYNSTYRVVSVLTVLHQDWLNGKEYKCKVSNKALPAPIEKTISKAKGQPREPQVYTLPPSREEMTKNQVSLTCLVKGFYPSDIAVEWESNGQPENNYKTTPPVLDSDGSFFLYSKLTVDKSRWQQGNVFSCSVMHEALHNHYTQKSLSLSPGK

SEQ ID NO: 743 - protein, 395 aa, Artificial Sequence
  TNF(R32W/S86T)-GGGGSGGGGSGGGGS-SCDKTH-Trastuzumab Fc fusion protein
VRSSSRTPSDKPVAHVVANPQAEGQLQWLNRWANALLANGVELRDNQLVVPSEGLYLIYSQVLFKGQGCPSTHVLLTHTISRIAVTYQTKVNLLSAIKSPCQRETPEGAEAKPWYEPIYLGGVFQLEKGDRLSAEINRPDYLDFAESGQVYFGIIALGGGGSGGGGSGGGGSSCDKTHAPELLGGPSVFLFPPKPKDTLMISRTPEVTCVVVDVSHEDPEVKFNWYVDGVEVHNAKTKPREEQYNSTYRVVSVLTVLHQDWLNGKEYKCKVSNKALPAPIEKTISKAKGQPREPQVYTLPPSREEMTKNQVSLTCLVKGFYPSDIAVEWESNGQPENNYKTTPPVLDSDGSFFLYSKLTVDKSRWQQGNVFSCSVMHEALHNHYTQKSLSLSPGK

SEQ ID NO: 744 - protein, 380 aa, Artificial Sequence
  TNF(V1M/R31C/C69V/Y87H/C101A/A145R)-SCDKTH-Trastuz umab Fc fusion protein
MRSSSRTPSDKPVAHVVANPQAEGQLQWLNCRANALLANGVELRDNQLVVPSEGLYLIYSQVLFKGQGVPSTHVLLTHTISRIAVSHQTKVNLLSAIKSPAQRETPEGAEAKPWYEPIYLGGVFQLEKGDRLSAEINRPDYLDFRESGQVYFGIIALSCDKTHAPELLGGPSVFLFPPKPKDTLMISRTPEVTCVVVDVSHEDPEVKFNWYVDGVEVHNAKTKPREEQYNSTYRVVSVLTVLHQDWLNGKEYKCKVSNKALPAPIEKTISKAKGQPREPQVYTLPPSREEMTKNQVSLTCLVKGFYPSDIAVEWESNGQPENNYKTTPPVLDSDGSFFLYSKLTVDKSRWQQGNVFSCSVMHEALHNHYTQKSLSLSPGK

SEQ ID NO: 745 - protein, 389 aa, Artificial Sequence
  TNF(V1M/R31C/C69V/Y87H/C101A/A145R)-GGGGSGGGGSGGGG S-Trastuzumab Fc fusion protein
MRSSSRTPSDKPVAHVVANPQAEGQLQWLNCRANALLANGVELRDNQLVVPSEGLYLIYSQVLFKGQGVPSTHVLLTHTISRIAVSHQTKVNLLSAIKSPAQRETPEGAEAKPWYEPIYLGGVFQLEKGDRLSAEINRPDYLDFRESGQVYFGIIALGGGGSGGGGSGGGGSAPELLGGPSVFLFPPKPKDTLMISRTPEVTCVVVDVSHEDPEVKFNWYVDGVEVHNAKTKPREEQYNSTYRVVSVLTVLHQDWLNGKEYKCKVSNKALPAPIEKTISKAKGQPREPQVYTLPPSREEMTKNQVSLTCLVKGFYPSDIAVEWESNGQPENNYKTTPPVLDSDGSFFLYSKLTVDKSRWQQGNVFSCSVMHEALHNHYTQKSLSLSPGK

SEQ ID NO: 746 - protein, 395 aa, Artificial Sequence
  TNF(V1M/R31C/C69V/Y87H/C101A/A145R)-GGGGSGGGGSGGGG S-SCDKTH-Trastuzumab Fc fusion protein
MRSSSRTPSDKPVAHVVANPQAEGQLQWLNCRANALLANGVELRDNQLVVPSEGLYLIYSQVLFKGQGVPSTHVLLTHTISRIAVSHQTKVNLLSAIKSPAQRETPEGAEAKPWYEPIYLGGVFQLEKGDRLSAEINRPDYLDFRESGQVYFGIIALGGGGSGGGGSGGGGSSCDKTHAPELLGGPSVFLFPPKPKDTLMISRTPEVTCVVVDVSHEDPEVKFNWYVDGVEVHNAKTKPREEQYNSTYRVVSVLTVLHQDWLNGKEYKCKVSNKALPAPIEKTISKAKGQPREPQVYTLPPSREEMTKNQVSLTCLVKGFYPSDIAVEWESNGQPENNYKTTPPVLDSDGSFFLYSKLTVDKSRWQQGNVFSCSVMHEALHNHYTQKSLSLSPGK

SEQ ID NO: 747 - protein, 380 aa, Artificial Sequence
  TNF(A84S/V85T/S86T/Y87H/Q88N/T89Q)-SCDKTH-Trastuzu mab Fc fusion protein
VRSSSRTPSDKPVAHVVANPQAEGQLQWLNRRANALLANGVELRDNQLVVPSEGLYLIYSQVLFKGQGCPSTHVLLTHTISRISTTHNQKVNLLSAIKSPCQRETPEGAEAKPWYEPIYLGGVFQLEKGDRLSAEINRPDYLDFAESGQVYFGIIALSCDKTHAPELLGGPSVFLFPPKPKDTLMISRTPEVTCVVVDVSHEDPEVKFNWYVDGVEVHNAKTKPREEQYNSTYRVVSVLTVLHQDWLNGKEYKCKVSNKALPAPIEKTISKAKGQPREPQVYTLPPSREEMTKNQVSLTCLVKGFYPSDIAVEWESNGQPENNYKTTPPVLDSDGSFFLYSKLTVDKSRWQQGNVFSCSVMHEALHNHYTQKSLSLSPGK

SEQ ID NO: 748 - protein, 389 aa, Artificial Sequence
  TNF(A84S/V85T/S86T/Y87H/Q88N/T89Q)-GGGGSGGGGSGGGGS -Trastuzumab Fc fusion protein
VRSSSRTPSDKPVAHVVANPQAEGQLQWLNRRANALLANGVELRDNQLVVPSEGLYLIYSQVLFKGQGCPSTHVLLTHTISRISTTHNQKVNLLSAIKSPCQRETPEGAEAKPWYEPIYLGGVFQLEKGDRLSAEINRPDYLDFAESGQVYFGIIALGGGGSGGGGSGGGGSAPELLGGPSVFLFPPKPKDTLMISRTPEVTCVVVDVSHEDPEVKFNWYVDGVEVHNAKTKPREEQYNSTYRVVSVLTVLHQDWLNGKEYKCKVSNKALPAPIEKTISKAKGQPREPQVYTLPPSREEMTKNQVSLTCLVKGFYPSDIAVEWESNGQPENNYKTTPPVLDSDGSFFLYSKLTVDKSRWQQGNVFSCSVMHEALHNHYTQKSLSLSPGK

SEQ ID NO: 749 - protein, 395 aa, Artificial Sequence
  TNF(A84S/V85T/S86T/Y87H/Q88N/T89Q)-GGGGSGGGGSGGGGS -SCDKTH-Trastuzumab Fc fusion protein
VRSSSRTPSDKPVAHVVANPQAEGQLQWLNRRANALLANGVELRDNQLVVPSEGLYLIYSQVLFKGQGCPSTHVLLTHTISRISTTHNQKVNLLSAIKSPCQRETPEGAEAKPWYEPIYLGGVFQLEKGDRLSAEINRPDYLDFAESGQVYFGIIALGGGGSGGGGSGGGGSSCDKTHAPELLGGPSVFLFPPKPKDTLMISRTPEVTCVVVDVSHEDPEVKFNWYVDGVEVHNAKTKPREEQYNSTYRVVSVLTVLHQDWLNGKEYKCKVSNKALPAPIEKTISKAKGQPREPQVYTLPPSREEMTKNQVSLTCLVKGFYPSDIAVEWESNGQPENNYKTTPPVLDSDGSFFLYSKLTVDKSRWQQGNVFSCSVMHEALHNHYTQKSLSLSPGK

SEQ ID NO: 750 - protein, 380 aa, Artificial Sequence
  TNF(I97T/A145R)-SCDKTH-Trastuzumab Fc fusion protein
VRSSSRTPSDKPVAHVVANPQAEGQLQWLNRRANALLANGVELRDNQLVVPSEGLYLIYSQVLFKGQGCPSTHVLLTHTISRIAVSYQTKVNLLSATKSPCQRETPEGAEAKPWYEPIYLGGVFQLEKGDRLSAEINRPDYLDFRESGQVYFGIIALSCDKTHAPELLGGPSVFLFPPKPKDTLMISRTPEVTCVVVDVSHEDPEVKFNWYVDGVEVHNAKTKPREEQYNSTYRVVSVLTVLHQDWLNGKEYKCKVSNKALPAPIEKTISKAKGQPREPQVYTLPPSREEMTKNQVSLTCLVKGFYPSDIAVEWESNGQPENNYKTTPPVLDSDGSFFLYSKLTVDKSRWQQGNVFSCSVMHEALHNHYTQKSLSLSPGK

SEQ ID NO: 751 - protein, 389 aa, Artificial Sequence
  TNF(I97T/A145R)-GGGGSGGGGSGGGGS-Trastuzumab Fc fusion protein
VRSSSRTPSDKPVAHVVANPQAEGQLQWLNRRANALLANGVELRDNQLVVPSEGLYLIYSQVLFKGQGCPSTHVLLTHTISRIAVSYQTKVNLLSATKSPCQRETPEGAEAKPWYEPIYLGGVFQLEKGDRLSAEINRPDYLDFRESGQVYFGIIALGGGGSGGGGSGGGGSAPELLGGPSVFLFPPKPKDTLMISRTPEVTCVVVDVSHEDPEVKFNWYVDGVEVHNAKTKPREEQYNSTYRVVSVLTVLHQDWLNGKEYKCKVSNKALPAPIEKTISKAKGQPREPQVYTLPPSREEMTKNQVSLTCLVKGFYPSDIAVEWESNGQPENNYKTTPPVLDSDGSFFLYSKLTVDKSRWQQGNVFSCSVMHEALHNHYTQKSLSLSPGK

SEQ ID NO: 752 - protein, 395 aa, Artificial Sequence
  TNF(I97T/A145R)-GGGGSGGGGSGGGGS-SCDKTH-Trastuzumab Fc fusion protein
VRSSSRTPSDKPVAHVVANPQAEGQLQWLNRRANALLANGVELRDNQLVVPSEGLYLIYSQVLFKGQGCPSTHVLLTHTISRIAVSYQTKVNLLSATKSPCQRETPEGAEAKPWYEPIYLGGVFQLEKGDRLSAEINRPDYLDFRESGQVYFGIIALGGGGSGGGGSGGGGSSCDKTHAPELLGGPSVFLFPPKPKDTLMISRTPEVTCVVVDVSHEDPEVKFNWYVDGVEVHNAKTKPREEQYNSTYRVVSVLTVLHQDWLNGKEYKCKVSNKALPAPIEKTISKAKGQPREPQVYTLPPSREEMTKNQVSLTCLVKGFYPSDIAVEWESNGQPENNYKTTPPVLDSDGSFFLYSKLTVDKSRWQQGNVFSCSVMHEALHNHYTQKSLSLSPGK

SEQ ID NO: 753 - protein, 386 aa, Artificial Sequence
  TNF(R32W/S86T)-ESKYGPPCPPCP-Nivolumab Fc fusion protein
VRSSSRTPSDKPVAHVVANPQAEGQLQWLNRWANALLANGVELRDNQLVVPSEGLYLIYSQVLFKGQGCPSTHVLLTHTISRIAVTYQTKVNLLSAIKSPCQRETPEGAEAKPWYEPIYLGGVFQLEKGDRLSAEINRPDYLDFAESGQVYFGIIALESKYGPPCPPCPAPEFLGGPSVFLFPPKPKDTLMISRTPEVTCVVVDVSQEDPEVQFNWYVDGVEVHNAKTKPREEQFNSTYRVVSVLTVLHQDWLNGKEYKCKVSNKGLPSSIEKTISKAKGQPREPQVYTLPPSQEEMTKNQVSLTCLVKGFYPSDIAVEWESNGQPENNYKTTPPVLDSDGSFFLYSRLTVDKSRWQEGNVFSCSVMHEALHNHYTQKSLSLSLGK

SEQ ID NO: 754 - protein, 389 aa, Artificial Sequence
  TNF(R32W/S86T)-GGGGSGGGGSGGGGS-Nivolumab Fc fusion protein
VRSSSRTPSDKPVAHVVANPQAEGQLQWLNRWANALLANGVELRDNQLVVPSEGLYLIYSQVLFKGQGCPSTHVLLTHTISRIAVTYQTKVNLLSAIKSPCQRETPEGAEAKPWYEPIYLGGVFQLEKGDRLSAEINRPDYLDFAESGQVYFGIIALGGGGSGGGGSGGGGSAPEFLGGPSVFLFPPKPKDTLMISRTPEVTCVVVDVSQEDPEVQFNWYVDGVEVHNAKTKPREEQFNSTYRVVSVLTVLHQDWLNGKEYKCKVSNKGLPSSIEKTISKAKGQPREPQVYTLPPSQEEMTKNQVSLTCLVKGFYPSDIAVEWESNGQPENNYKTTPPVLDSDGSFFLYSRLTVDKSRWQEGNVFSCSVMHEALHNHYTQKSLSLSLGK

SEQ ID NO: 755 - protein, 401 aa, Artificial Sequence
  TNF(R32W/S86T)-GGGGSGGGGSGGGGS-ESKYGPPCPPCP-Nivolu mab Fc fusion protein
VRSSSRTPSDKPVAHVVANPQAEGQLQWLNRWANALLANGVELRDNQLVVPSEGLYLIYSQVLFKGQGCPSTHVLLTHTISRIAVTYQTKVNLLSAIKSPCQRETPEGAEAKPWYEPIYLGGVFQLEKGDRLSAEINRPDYLDFAESGQVYFGIIALGGGGSGGGGSGGGGSESKYGPPCPPCPAPEFLGGPSVFLFPPKPKDTLMISRTPEVTCVVVDVSQEDPEVQFNWYVDGVEVHNAKTKPREEQFNSTYRVVSVLTVLHQDWLNGKEYKCKVSNKGLPSSIEKTISKAKGQPREPQVYTLPPSQEEMTKNQVSLTCLVKGFYPSDIAVEWESNGQPENNYKTTPPVLDSDGSFFLYSRLTVDKSRWQEGNVFSCSVMHEALHNHYTQKSLSLSLGK

SEQ ID NO: 756 - protein, 386 aa, Artificial Sequence
  TNF(V1M/R31C/C69V/Y87H/C101A/A145R)-ESKYGPPCPPCP-N ivolumab Fc fusion protein
MRSSSRTPSDKPVAHVVANPQAEGQLQWLNCRANALLANGVELRDNQLVVPSEGLYLIYSQVLFKGQGVPSTHVLLTHTISRIAVSHQTKVNLLSAIKSPAQRETPEGAEAKPWYEPIYLGGVFQLEKGDRLSAEINRPDYLDFRESGQVYFGIIALESKYGPPCPPCPAPEFLGGPSVFLFPPKPKDTLMISRTPEVTCVVVDVSQEDPEVQFNWYVDGVEVHNAKTKPREEQFNSTYRVVSVLTVLHQDWLNGKEYKCKVSNKGLPSSIEKTISKAKGQPREPQVYTLPPSQEEMTKNQVSLTCLVKGFYPSDIAVEWESNGQPENNYKTTPPVLDSDGSFFLYSRLTVDKSRWQEGNVFSCSVMHEALHNHYTQKSLSLSLGK

SEQ ID NO: 757 - protein, 389 aa, Artificial Sequence
  TNF(V1M/R31C/C69V/Y87H/C101A/A145R)-GGGGSGGGGSGGGG S-Nivolumab Fc fusion protein
MRSSSRTPSDKPVAHVVANPQAEGQLQWLNCRANALLANGVELRDNQLVVPSEGLYLIYSQVLFKGQGVPSTHVLLTHTISRIAVSHQTKVNLLSAIKSPAQRETPEGAEAKPWYEPIYLGGVFQLEKGDRLSAEINRPDYLDFRESGQVYFGIIALGGGGSGGGGSGGGGSAPEFLGGPSVFLFPPKPKDTLMISRTPEVTCVVVDVSQEDPEVQFNWYVDGVEVHNAKTKPREEQFNSTYRVVSVLTVLHQDWLNGKEYKCKVSNKGLPSSIEKTISKAKGQPREPQVYTLPPSQEEMTKNQVSLTCLVKGFYPSDIAVEWESNGQPENNYKTTPPVLDSDGSFFLYSRLTVDKSRWQEGNVFSCSVMHEALHNHYTQKSLSLSLGK

SEQ ID NO: 758 - protein, 401 aa, Artificial Sequence
  TNF(V1M/R31C/C69V/Y87H/C101A/A145R)-GGGGSGGGGSGGGG S-ESKYGPPCPPCP-Nivolumab Fc fusion protein
MRSSSRTPSDKPVAHVVANPQAEGQLQWLNCRANALLANGVELRDNQLVVPSEGLYLIYSQVLFKGQGVPSTHVLLTHTISRIAVSHQTKVNLLSAIKSPAQRETPEGAEAKPWYEPIYLGGVFQLEKGDRLSAEINRPDYLDFRESGQVYFGIIALGGGGSGGGGSGGGGSESKYGPPCPPCPAPEFLGGPSVFLFPPKPKDTLMISRTPEVTCVVVDVSQEDPEVQFNWYVDGVEVHNAKTKPREEQFNSTYRVVSVLTVLHQDWLNGKEYKCKVSNKGLPSSIEKTISKAKGQPREPQVYTLPPSQEEMTKNQVSLTCLVKGFYPSDIAVEWESNGQPENNYKTTPPVLDSDGSFFLYSRLTVDKSRWQEGNVFSCSVMHEALHNHYTQKSLSLSLGK

SEQ ID NO: 759 - protein, 386 aa, Artificial Sequence
  TNF(A84S/V85T/S86T/Y87H/Q88N/T89Q)-ESKYGPPCPPCP-Ni volumab Fc fusion protein
VRSSSRTPSDKPVAHVVANPQAEGQLQWLNRRANALLANGVELRDNQLVVPSEGLYLIYSQVLFKGQGCPSTHVLLTHTISRISTTHNQKVNLLSAIKSPCQRETPEGAEAKPWYEPIYLGGVFQLEKGDRLSAEINRPDYLDFAESGQVYFGIIALESKYGPPCPPCPAPEFLGGPSVFLFPPKPKDTLMISRTPEVTCVVVDVSQEDPEVQFNWYVDGVEVHNAKTKPREEQFNSTYRVVSVLTVLHQDWLNGKEYKCKVSNKGLPSSIEKTISKAKGQPREPQVYTLPPSQEEMTKNQVSLTCLVKGFYPSDIAVEWESNGQPENNYKTTPPVLDSDGSFFLYSRLTVDKSRWQEGNVFSCSVMHEALHNHYTQKSLSLSLGK

SEQ ID NO: 760 - protein, 389 aa, Artificial Sequence
  TNF(A84S/V85T/S86T/Y87H/Q88N/T89Q)-GGGGSGGGGSGGGGS -Nivolumab Fc fusion protein
VRSSSRTPSDKPVAHVVANPQAEGQLQWLNRRANALLANGVELRDNQLVVPSEGLYLIYSQVLFKGQGCPSTHVLLTHTISRISTTHNQKVNLLSAIKSPCQRETPEGAEAKPWYEPIYLGGVFQLEKGDRLSAEINRPDYLDFAESGQVYFGIIALGGGGSGGGGSGGGGSAPEFLGGPSVFLFPPKPKDTLMISRTPEVTCVVVDVSQEDPEVQFNWYVDGVEVHNAKTKPREEQFNSTYRVVSVLTVLHQDWLNGKEYKCKVSNKGLPSSIEKTISKAKGQPREPQVYTLPPSQEEMTKNQVSLTCLVKGFYPSDIAVEWESNGQPENNYKTTPPVLDSDGSFFLYSRLTVDKSRWQEGNVFSCSVMHEALHNHYTQKSLSLSLGK

SEQ ID NO: 761 - protein, 401 aa, Artificial Sequence
  TNF(A84S/V85T/S86T/Y87H/Q88N/T89Q)-GGGGSGGGGSGGGGS -ESKYGPPCPPCP-Nivolumab Fc fusion protein
VRSSSRTPSDKPVAHVVANPQAEGQLQWLNRRANALLANGVELRDNQLVVPSEGLYLIYSQVLFKGQGCPSTHVLLTHTISRISTTHNQKVNLLSAIKSPCQRETPEGAEAKPWYEPIYLGGVFQLEKGDRLSAEINRPDYLDFAESGQVYFGIIALGGGGSGGGGSGGGGSESKYGPPCPPCPAPEFLGGPSVFLFPPKPKDTLMISRTPEVTCVVVDVSQEDPEVQFNWYVDGVEVHNAKTKPREEQFNSTYRVVSVLTVLHQDWLNGKEYKCKVSNKGLPSSIEKTISKAKGQPREPQVYTLPPSQEEMTKNQVSLTCLVKGFYPSDIAVEWESNGQPENNYKTTPPVLDSDGSFFLYSRLTVDKSRWQEGNVFSCSVMHEALHNHYTQKSLSLSLGK

SEQ ID NO: 762 - protein, 386 aa, Artificial Sequence
  TNF(I97T/A145R)-ESKYGPPCPPCP-Nivolumab Fc fusion protein
VRSSSRTPSDKPVAHVVANPQAEGQLQWLNRRANALLANGVELRDNQLVVPSEGLYLIYSQVLFKGQGCPSTHVLLTHTISRIAVSYQTKVNLLSATKSPCQRETPEGAEAKPWYEPIYLGGVFQLEKGDRLSAEINRPDYLDFRESGQVYFGIIALESKYGPPCPPCPAPEFLGGPSVFLFPPKPKDTLMISRTPEVTCVVVDVSQEDPEVQFNWYVDGVEVHNAKTKPREEQFNSTYRVVSVLTVLHQDWLNGKEYKCKVSNKGLPSSIEKTISKAKGQPREPQVYTLPPSQEEMTKNQVSLTCLVKGFYPSDIAVEWESNGQPENNYKTTPPVLDSDGSFFLYSRLTVDKSRWQEGNVFSCSVMHEALHNHYTQKSLSLSLGK

SEQ ID NO: 763 - protein, 389 aa, Artificial Sequence
  TNF(I97T/A145R)-GGGGSGGGGSGGGGS-Nivolumab Fc fusion protein
VRSSSRTPSDKPVAHVVANPQAEGQLQWLNRRANALLANGVELRDNQLVVPSEGLYLIYSQVLFKGQGCPSTHVLLTHTISRIAVSYQTKVNLLSATKSPCQRETPEGAEAKPWYEPIYLGGVFQLEKGDRLSAEINRPDYLDFRESGQVYFGIIALGGGGSGGGGSGGGGSAPEFLGGPSVFLFPPKPKDTLMISRTPEVTCVVVDVSQEDPEVQFNWYVDGVEVHNAKTKPREEQFNSTYRVVSVLTVLHQDWLNGKEYKCKVSNKGLPSSIEKTISKAKGQPREPQVYTLPPSQEEMTKNQVSLTCLVKGFYPSDIAVEWESNGQPENNYKTTPPVLDSDGSFFLYSRLTVDKSRWQEGNVFSCSVMHEALHNHYTQKSLSLSLGK

SEQ ID NO: 764 - protein, 401 aa, Artificial Sequence
  TNF(I97T/A145R)-GGGGSGGGGSGGGGS-ESKYGPPCPPCP-Nivol umab Fc fusion protein
VRSSSRTPSDKPVAHVVANPQAEGQLQWLNRRANALLANGVELRDNQLVVPSEGLYLIYSQVLFKGQGCPSTHVLLTHTISRIAVSYQTKVNLLSATKSPCQRETPEGAEAKPWYEPIYLGGVFQLEKGDRLSAEINRPDYLDFRESGQVYFGIIALGGGGSGGGGSGGGGSESKYGPPCPPCPAPEFLGGPSVFLFPPKPKDTLMISRTPEVTCVVVDVSQEDPEVQFNWYVDGVEVHNAKTKPREEQFNSTYRVVSVLTVLHQDWLNGKEYKCKVSNKGLPSSIEKTISKAKGQPREPQVYTLPPSQEEMTKNQVSLTCLVKGFYPSDIAVEWESNGQPENNYKTTPPVLDSDGSFFLYSRLTVDKSRWQEGNVFSCSVMHEALHNHYTQKSLSLSLGK

SEQ ID NO: 765 - protein, 157 aa, Artificial Sequence
  TNFR2-selective agonist TNF mutein K65W
VRSSSRTPSDKPVAHVVANPQAEGQLQWLNRRANALLANGVELRDNQLVVPSEGLYLIYSQVLFWGQGCPSTHVLLTHTISRIAVSYQTKVNLLSAIKSPCQRETPEGAEAKPWYEPIYLGGVFQLEKGDRLSAEINRPDYLDFAESGQVYFGIIAL

SEQ ID NO: 766 - protein, 157 aa, Artificial Sequence
  TNFR2-selective agonist TNF mutein D143Y
VRSSSRTPSDKPVAHVVANPQAEGQLQWLNRRANALLANGVELRDNQLVVPSEGLYLIYSQVLFKGQGCPSTHVLLTHTISRIAVSYQTKVNLLSAIKSPCQRETPEGAEAKPWYEPIYLGGVFQLEKGDRLSAEINRPDYLYFAESGQVYFGIIAL

SEQ ID NO: 767 - protein, 157 aa, Artificial Sequence
  TNFR2-selective agonist TNF mutein D143F
VRSSSRTPSDKPVAHVVANPQAEGQLQWLNRRANALLANGVELRDNQLVVPSEGLYLIYSQVLFKGQGCPSTHVLLTHTISRIAVSYQTKVNLLSAIKSPCQRETPEGAEAKPWYEPIYLGGVFQLEKGDRLSAEINRPDYLFFAESGQVYFGIIAL

SEQ ID NO: 768 - protein, 157 aa, Artificial Sequence
  TNFR2-selective agonist TNF mutein D143N
VRSSSRTPSDKPVAHVVANPQAEGQLQWLNRRANALLANGVELRDNQLVVPSEGLYLIYSQVLFKGQGCPSTHVLLTHTISRIAVSYQTKVNLLSAIKSPCQRETPEGAEAKPWYEPIYLGGVFQLEKGDRLSAEINRPDYLNFAESGQVYFGIIAL

SEQ ID NO: 769 - protein, 157 aa, Artificial Sequence
  TNFR2-selective agonist TNF mutein D143E
VRSSSRTPSDKPVAHVVANPQAEGQLQWLNRRANALLANGVELRDNQLVVPSEGLYLIYSQVLFKGQGCPSTHVLLTHTISRIAVSYQTKVNLLSAIKSPCQRETPEGAEAKPWYEPIYLGGVFQLEKGDRLSAEINRPDYLEFAESGQVYFGIIAL

SEQ ID NO: 770 - protein, 157 aa, Artificial Sequence
  TNFR2-selective agonist TNF mutein D143W
VRSSSRTPSDKPVAHVVANPQAEGQLQWLNRRANALLANGVELRDNQLVVPSEGLYLIYSQVLFKGQGCPSTHVLLTHTISRIAVSYQTKVNLLSAIKSPCQRETPEGAEAKPWYEPIYLGGVFQLEKGDRLSAEINRPDYLWFAESGQVYFGIIAL

SEQ ID NO: 771 - protein, 157 aa, Artificial Sequence
  TNFR2-selective agonist TNF mutein D143V
VRSSSRTPSDKPVAHVVANPQAEGQLQWLNRRANALLANGVELRDNQLVVPSEGLYLIYSQVLFKGQGCPSTHVLLTHTISRIAVSYQTKVNLLSAIKSPCQRETPEGAEAKPWYEPIYLGGVFQLEKGDRLSAEINRPDYLVFAESGQVYFGIIAL

SEQ ID NO: 772 - protein, 157 aa, Artificial Sequence
  TNFR2-selective agonist TNF mutein A145R
VRSSSRTPSDKPVAHVVANPQAEGQLQWLNRRANALLANGVELRDNQLVVPSEGLYLIYSQVLFKGQGCPSTHVLLTHTISRIAVSYQTKVNLLSAIKSPCQRETPEGAEAKPWYEPIYLGGVFQLEKGDRLSAEINRPDYLDFRESGQVYFGIIAL

SEQ ID NO: 773 - protein, 157 aa, Artificial Sequence
  TNFR2-selective agonist TNF mutein A145H
VRSSSRTPSDKPVAHVVANPQAEGQLQWLNRRANALLANGVELRDNQLVVPSEGLYLIYSQVLFKGQGCPSTHVLLTHTISRIAVSYQTKVNLLSAIKSPCQRETPEGAEAKPWYEPIYLGGVFQLEKGDRLSAEINRPDYLDFHESGQVYFGIIAL

SEQ ID NO: 774 - protein, 157 aa, Artificial Sequence
  TNFR2-selective agonist TNF mutein A145K
VRSSSRTPSDKPVAHVVANPQAEGQLQWLNRRANALLANGVELRDNQLVVPSEGLYLIYSQVLFKGQGCPSTHVLLTHTISRIAVSYQTKVNLLSAIKSPCQRETPEGAEAKPWYEPIYLGGVFQLEKGDRLSAEINRPDYLDFKESGQVYFGIIAL

SEQ ID NO: 775 - protein, 157 aa, Artificial Sequence
  TNFR2-selective agonist TNF mutein A145F
VRSSSRTPSDKPVAHVVANPQAEGQLQWLNRRANALLANGVELRDNQLVVPSEGLYLIYSQVLFKGQGCPSTHVLLTHTISRIAVSYQTKVNLLSAIKSPCQRETPEGAEAKPWYEPIYLGGVFQLEKGDRLSAEINRPDYLDFFESGQVYFGIIAL

SEQ ID NO: 776 - protein, 157 aa, Artificial Sequence
  TNFR2-selective agonist TNF mutein A145W
VRSSSRTPSDKPVAHVVANPQAEGQLQWLNRRANALLANGVELRDNQLVVPSEGLYLIYSQVLFKGQGCPSTHVLLTHTISRIAVSYQTKVNLLSAIKSPCQRETPEGAEAKPWYEPIYLGGVFQLEKGDRLSAEINRPDYLDFWESGQVYFGIIAL

SEQ ID NO: 777 - protein, 157 aa, Artificial Sequence
  TNFR2-selective agonist TNF mutein E146Q
VRSSSRTPSDKPVAHVVANPQAEGQLQWLNRRANALLANGVELRDNQLVVPSEGLYLIYSQVLFKGQGCPSTHVLLTHTISRIAVSYQTKVNLLSAIKSPCQRETPEGAEAKPWYEPIYLGGVFQLEKGDRLSAEINRPDYLDFAQSGQVYFGIIAL

SEQ ID NO: 778 - protein, 157 aa, Artificial Sequence
  TNFR2-selective agonist TNF mutein E146H
VRSSSRTPSDKPVAHVVANPQAEGQLQWLNRRANALLANGVELRDNQLVVPSEGLYLIYSQVLFKGQGCPSTHVLLTHTISRIAVSYQTKVNLLSAIKSPCQRETPEGAEAKPWYEPIYLGGVFQLEKGDRLSAEINRPDYLDFAHSGQVYFGIIAL

SEQ ID NO: 779 - protein, 157 aa, Artificial Sequence
  TNFR2-selective agonist TNF mutein E146K
VRSSSRTPSDKPVAHVVANPQAEGQLQWLNRRANALLANGVELRDNQLVVPSEGLYLIYSQVLFKGQGCPSTHVLLTHTISRIAVSYQTKVNLLSAIKSPCQRETPEGAEAKPWYEPIYLGGVFQLEKGDRLSAEINRPDYLDFAKSGQVYFGIIAL

SEQ ID NO: 780 - protein, 157 aa, Artificial Sequence
  TNFR2-selective agonist TNF mutein E146N
VRSSSRTPSDKPVAHVVANPQAEGQLQWLNRRANALLANGVELRDNQLVVPSEGLYLIYSQVLFKGQGCPSTHVLLTHTISRIAVSYQTKVNLLSAIKSPCQRETPEGAEAKPWYEPIYLGGVFQLEKGDRLSAEINRPDYLDFANSGQVYFGIIAL

SEQ ID NO: 781 - protein, 157 aa, Artificial Sequence
  TNFR2-selective agonist TNF mutein D143N/A145R
VRSSSRTPSDKPVAHVVANPQAEGQLQWLNRRANALLANGVELRDNQLVVPSEGLYLIYSQVLFKGQGCPSTHVLLTHTISRIAVSYQTKVNLLSAIKSPCQRETPEGAEAKPWYEPIYLGGVFQLEKGDRLSAEINRPDYLNFRESGQVYFGIIAL

SEQ ID NO: 782 - protein, 157 aa, Artificial Sequence
  TNFR2-selective agonist TNF mutein A145R/S147T
VRSSSRTPSDKPVAHVVANPQAEGQLQWLNRRANALLANGVELRDNQLVVPSEGLYLIYSQVLFKGQGCPSTHVLLTHTISRIAVSYQTKVNLLSAIKSPCQRETPEGAEAKPWYEPIYLGGVFQLEKGDRLSAEINRPDYLDFRETGQVYFGIIAL

SEQ ID NO: 783 - protein, 157 aa, Artificial Sequence
  TNFR2-selective agonist TNF mutein Q88N/T89S/A145S/E146A/S147D
VRSSSRTPSDKPVAHVVANPQAEGQLQWLNRRANALLANGVELRDNQLVVPSEGLYLIYSQVLFKGQGCPSTHVLLTHTISRIAVSYNSKVNLLSAIKSPCQRETPEGAEAKPWYEPIYLGGVFQLEKGDRLSAEINRPDYLDFSADGQVYFGIIAL

SEQ ID NO: 784 - protein, 157 aa, Artificial Sequence
  TNFR2-selective agonist TNF mutein Q88N/A145I/E146G/S147D
VRSSSRTPSDKPVAHVVANPQAEGQLQWLNRRANALLANGVELRDNQLVVPSEGLYLIYSQVLFKGQGCPSTHVLLTHTISRIAVSYNTKVNLLSAIKSPCQRETPEGAEAKPWYEPIYLGGVFQLEKGDRLSAEINRPDYLDFIGDGQVYFGIIAL

SEQ ID NO: 785 - protein, 157 aa, Artificial Sequence
  TNFR2-selective agonist TNF mutein A145H/E146S/S147D
VRSSSRTPSDKPVAHVVANPQAEGQLQWLNRRANALLANGVELRDNQLVVPSEGLYLIYSQVLFKGQGCPSTHVLLTHTISRIAVSYQTKVNLLSAIKSPCQRETPEGAEAKPWYEPIYLGGVFQLEKGDRLSAEINRPDYLDFHSDGQVYFGIIAL

SEQ ID NO: 786 - protein, 157 aa, Artificial Sequence
  TNFR2-selective agonist TNF mutein A145H/S147D
VRSSSRTPSDKPVAHVVANPQAEGQLQWLNRRANALLANGVELRDNQLVVPSEGLYLIYSQVLFKGQGCPSTHVLLTHTISRIAVSYQTKVNLLSAIKSPCQRETPEGAEAKPWYEPIYLGGVFQLEKGDRLSAEINRPDYLDFHEDGQVYFGIIAL

SEQ ID NO: 787 - protein, 157 aa, Artificial Sequence
  TNFR2-selective agonist TNF mutein L29V/A145D/E146D/S147D
VRSSSRTPSDKPVAHVVANPQAEGQLQWVNRRANALLANGVELRDNQLVVPSEGLYLIYSQVLFKGQGCPSTHVLLTHTISRIAVSYQTKVNLLSAIKSPCQRETPEGAEAKPWYEPIYLGGVFQLEKGDRLSAEINRPDYLDFDDDGQVYFGIIAL

SEQ ID NO: 788 - protein, 157 aa, Artificial Sequence
  TNFR2-selective agonist TNF mutein A145N/E146D/S147D
VRSSSRTPSDKPVAHVVANPQAEGQLQWLNRRANALLANGVELRDNQLVVPSEGLYLIYSQVLFKGQGCPSTHVLLTHTISRIAVSYQTKVNLLSAIKSPCQRETPEGAEAKPWYEPIYLGGVFQLEKGDRLSAEINRPDYLDFNDDGQVYFGIIAL

SEQ ID NO: 789 - protein, 157 aa, Artificial Sequence
  TNFR2-selective agonist TNF mutein A145T/E146S/S147D
VRSSSRTPSDKPVAHVVANPQAEGQLQWLNRRANALLANGVELRDNQLVVPSEGLYLIYSQVLFKGQGCPSTHVLLTHTISRIAVSYQTKVNLLSAIKSPCQRETPEGAEAKPWYEPIYLGGVFQLEKGDRLSAEINRPDYLDFTSDGQVYFGIIAL

SEQ ID NO: 790 - protein, 157 aa, Artificial Sequence
  TNFR2-selective agonist TNF mutein A145Q/E146D/S147D
VRSSSRTPSDKPVAHVVANPQAEGQLQWLNRRANALLANGVELRDNQLVVPSEGLYLIYSQVLFKGQGCPSTHVLLTHTISRIAVSYQTKVNLLSAIKSPCQRETPEGAEAKPWYEPIYLGGVFQLEKGDRLSAEINRPDYLDFQDDGQVYFGIIAL

SEQ ID NO: 791 - protein, 157 aa, Artificial Sequence
  TNFR2-selective agonist TNF mutein A145T/E146D/S147D
VRSSSRTPSDKPVAHVVANPQAEGQLQWLNRRANALLANGVELRDNQLVVPSEGLYLIYSQVLFKGQGCPSTHVLLTHTISRIAVSYQTKVNLLSAIKSPCQRETPEGAEAKPWYEPIYLGGVFQLEKGDRLSAEINRPDYLDFTDDGQVYFGIIAL

SEQ ID NO: 792 - protein, 157 aa, Artificial Sequence
  TNFR2-selective agonist TNF mutein A145D/E146G/S147D
VRSSSRTPSDKPVAHVVANPQAEGQLQWLNRRANALLANGVELRDNQLVVPSEGLYLIYSQVLFKGQGCPSTHVLLTHTISRIAVSYQTKVNLLSAIKSPCQRETPEGAEAKPWYEPIYLGGVFQLEKGDRLSAEINRPDYLDFDGDGQVYFGIIAL

SEQ ID NO: 793 - protein, 157 aa, Artificial Sequence
  TNFR2-selective agonist TNF mutein A145D/S147D
VRSSSRTPSDKPVAHVVANPQAEGQLQWLNRRANALLANGVELRDNQLVVPSEGLYLIYSQVLFKGQGCPSTHVLLTHTISRIAVSYQTKVNLLSAIKSPCQRETPEGAEAKPWYEPIYLGGVFQLEKGDRLSAEINRPDYLDFDEDGQVYFGIIAL

SEQ ID NO: 794 - protein, 157 aa, Artificial Sequence
  TNFR2-selective agonist TNF mutein A145K/E146D/S147T
VRSSSRTPSDKPVAHVVANPQAEGQLQWLNRRANALLANGVELRDNQLVVPSEGLYLIYSQVLFKGQGCPSTHVLLTHTISRIAVSYQTKVNLLSAIKSPCQRETPEGAEAKPWYEPIYLGGVFQLEKGDRLSAEINRPDYLDFKDTGQVYFGIIAL

SEQ ID NO: 795 - protein, 157 aa, Artificial Sequence
  TNFR2-selective agonist TNF mutein A145R/E146T/S147D
VRSSSRTPSDKPVAHVVANPQAEGQLQWLNRRANALLANGVELRDNQLVVPSEGLYLIYSQVLFKGQGCPSTHVLLTHTISRIAVSYQTKVNLLSAIKSPCQRETPEGAEAKPWYEPIYLGGVFQLEKGDRLSAEINRPDYLDFRTDGQVYFGIIAL

SEQ ID NO: 796 - protein, 157 aa, Artificial Sequence; identical to SEQ ID NO: 782
  TNFR2-selective agonist TNF mutein A145R/S147T

SEQ ID NO: 797 - protein, 157 aa, Artificial Sequence
  TNFR2-selective agonist TNF mutein E146D/S147D
VRSSSRTPSDKPVAHVVANPQAEGQLQWLNRRANALLANGVELRDNQLVVPSEGLYLIYSQVLFKGQGCPSTHVLLTHTISRIAVSYQTKVNLLSAIKSPCQRETPEGAEAKPWYEPIYLGGVFQLEKGDRLSAEINRPDYLDFADDGQVYFGIIAL

SEQ ID NO: 798 - protein, 157 aa, Artificial Sequence
  TNFR2-selective agonist TNF mutein D143V/F144L/A145S
VRSSSRTPSDKPVAHVVANPQAEGQLQWLNRRANALLANGVELRDNQLVVPSEGLYLIYSQVLFKGQGCPSTHVLLTHTISRIAVSYQTKVNLLSAIKSPCQRETPEGAEAKPWYEPIYLGGVFQLEKGDRLSAEINRPDYLVLSESGQVYFGIIAL

SEQ ID NO: 799 - protein, 157 aa, Artificial Sequence
  TNFR2-selective agonist TNF mutein D143V/A145S
VRSSSRTPSDKPVAHVVANPQAEGQLQWLNRRANALLANGVELRDNQLVVPSEGLYLIYSQVLFKGQGCPSTHVLLTHTISRIAVSYQTKVNLLSAIKSPCQRETPEGAEAKPWYEPIYLGGVFQLEKGDRLSAEINRPDYLVFSESGQVYFGIIAL

SEQ ID NO: 800 - protein, 157 aa, Artificial Sequence
  TNF07 (TNFR2-selective agonist TNF mutein S95C/G148C)
VRSSSRTPSDKPVAHVVANPQAEGQLQWLNRRANALLANGVELRDNQLVVPSEGLYLIYSQVLFKGQGCPSTHVLLTHTISRIAVSYQTKVNLLCAIKSPCQRETPEGAEAKPWYEPIYLGGVFQLEKGDRLSAEINRPDYLDFAESCQVYFGIIAL

SEQ ID NO: 801 - protein, 157 aa, Artificial Sequence
  TNFR2-selective TNF mutein A145T
VRSSSRTPSDKPVAHVVANPQAEGQLQWLNRRANALLANGVELRDNQLVVPSEGLYLIYSQVLFKGQGCPSTHVLLTHTISRIAVSYQTKVNLLSAIKSPCQRETPEGAEAKPWYEPIYLGGVFQLEKGDRLSAEINRPDYLDFTESGQVYFGIIAL

SEQ ID NO: 802 - protein, 157 aa, Artificial Sequence
  DN-TNF L57Y
VRSSSRTPSDKPVAHVVANPQAEGQLQWLNRRANALLANGVELRDNQLVVPSEGLYYIYSQVLFKGQGCPSTHVLLTHTISRIAVSYQTKVNLLSAIKSPCQRETPEGAEAKPWYEPIYLGGVFQLEKGDRLSAEINRPDYLDFAESGQVYFGIIAL

SEQ ID NO: 803 - protein, 472 aa, Artificial Sequence
  scTNFR2 (human TNFR2-selective single chain agonist TNF mutein trimer D143N/A145R)
SSRTPSDKPVAHVVANPQAEGQLQWLNRRANALLANGVELRDNQLVVPSEGLYLIYSQVLFKGQGCPSTHVLLTHTISRIAVSYQTKVNLLSAIKSPCQRETPEGAEAKPWYEPIYLGGVFQLEKGDRLSAEINRPDYLNFRESGQVYFGIIALGGGGSSSRTPSDKPVAHVVANPQAEGQLQWLNRRANALLANGVELRDNQLVVPSEGLYLIYSQVLFKGQGCPSTHVLLTHTISRIAVSYQTKVNLLSAIKSPCQRETPEGAEAKPWYEPIYLGGVFQLEKGDRLSAEINRPDYLNFRESGQVYFGIIALGGGGSSSRTPSDKPVAHVVANPQAEGQLQWLNRRANALLANGVELRDNQLVVPSEGLYLIYSQVLFKGQGCPSTHVLLTHTISRIAVSYQTKVNLLSAIKSPCQRETPEGAEAKPWYEPIYLGGVFQLEKGDRLSAEINRPDYLNFRESGQVYFGIIAL

SEQ ID NO: 804 - protein, 1808 aa, Gallus gallus
  chicken tenascin C (TNC)
  DOMAIN (110)...(139): trimerization domain
MGLPSQVLACAILGLLYQHASGGLIKRIIRQKRETGLNVTLPEDNQPVVFNHVYNIKLPVGSLCSVDLDTASGDADLKAEIEPVKNYEEHTVNEGNQIVFTHRINIPRRACGCAAAPDIKDLLSRLEELEGLVSSLREQCASGAGCCPNSQTAEGRLDTAPYCSGHGNYSTEICGCVCEPGWKGPNCSEPACPRNCLNRGLCVRGKCICEEGFTGEDCSQAACPSDCNDQGKCVDGVCVCFEGYTGPDCGEELCPHGCGIHGRCVGGRCVCHEGFTGEDCNEPLCPNNCHNRGRCVDNECVCDEGYTGEDCGELICPNDCFDRGRCINGTCFCEEGYTGEDCGELTCPNNCNGNGRCENGLCVCHEGFVGDDCSQKRCPKDCNNRGHCVDGRCVCHEGYLGEDCGELRCPNDCHNRGRCINGQCVCDEGFIGEDCGELRCPNDCHNRGRCVNGQCECHEGFIGEDCGELRCPNDCNSHGRCVNGQCVCDEGYTGEDCGELRCPNDCHNRGRCVEGRCVCDNGFMGEDCGELSCPNDCHQHGRCVDGRCVCHEGFTGEDCRERSCPNDCNNVGRCVEGRCVCEEGYMGIDCSDVSPPTELTVTNVTDKTVNLEWKHENLVNEYLVTYVPTSSGGLDLQFTVPGNQTSATIHELEPGVEYFIRVFAILKNKKSIPVSARVATYLPAPEGLKFKSVRETSVQVEWDPLSISFDGWELVFRNMQKKDDNGDITSSLKRPETSYMQPGLAPGQQYNVSLHIVKNNTRGPGLSRVITTKLDAPSQIEAKDVTDTTALITWSKPLAEIEGIELTYGPKDVPGDRTTIDLSEDENQYSIGNLRPHTEYEVTLISRRGDMESDPAKEVFVTDLDAPRNLKRVSQTDNSITLEWKNSHANIDNYRIKFAPISGGDHTELTVPKGNQATTRATLTGLRPGTEYGIGVTAVRQDRESAPATINAGTDLDNPKDLEVSDPTETTLSLRWRRPVAKFDRYRLTYVSPSGKKNEMEIPVDSTSFILRGLDAGTEYTISLVAEKGRHKSKPTTIKGSTEEEPELGNLSVSETGWDGFQLTWTAADGAYENFVIQVQQSDNPEETWNITVPGGQHSVNVTGLKANTPYNVTLYGVIRGYRTKPLYVETTTGAHPEVGELTVSDITPESFNLSWTTTNGDFDAFTIEIIDSNRLLEPMEFNISGNSRTAHISGLSPSTDFIVYLYGISHGFRTQAISAAATTEAEPEVDNLLVSDATPDGFRLSWTADDGVFDSFVLKIRDTKRKSDPLELIVPGHERTHDITGLKEGTEYEIELYGVSSGRRSQPINSVATTVVGSPKGISFSDITENSATVSWTPPRSRVDSYRVSYVPITGGTPNVVTVDGSKTRTKLVKLVPGVDYNVNIISVKGFEESEPISGILKTALDSPSGLVVMNITDSEALATWQPAIAAVDNYIVSYSSEDEPEVTQMVSGNTVEYDLNGLRPATEYTLRVHAVKDAQKSETLSTQFTTGLDAPKDLSATEVQSETAVITWRPPRAPVTDYLLTYESIDGRVKEVILDPETTSYTLTELSPSTQYTVKLQALSRSMRSKMIQTVFTTTGLLYPYPKDCSQALLNGEVTSGLYTIYLNGDRTQPLQVFCDMAEDGGGWIVFLRRQNGKEDFYRNWKNYVAGFGDPKDEFWIGLENLHKISSQGQYELRVDLRDRGETAYAVYDKFSVGDAKTRYRLRVDGYSGTAGDSMTYHNGRSFSTFDKDNDSAITNCALSYKGAFWYKNCHRVNLMGRYGDNNHSQGVNWFHWKGHEYSIQFAEMKLRPSSFRNLEGRRKRA

SEQ ID NO: 805 - protein, 30 aa, Gallus gallus
  trimerization domain of Chicken Tenascin C (TNC)
ACGCAAAPDIKDLLSRLEELEGLVSSLREQ

SEQ ID NO: 806 - protein, 2201 aa, homo sapiens
  human tenascin C (TNC)
  DOMAIN (110)...(139): trimerization domain
MGAMTQLLAGVFLAFLALATEGGVLKKVIRHKRQSGVNATLPEENQPVVFNHVYNIKLPVGSQCSVDLESASGEKDLAPPSEPSESFQEHTVDGENQIVFTHRINIPRRACGCAAAPDVKELLSRLEELENLVSSLREQCTAGAGCCLQPATGRLDTRPFCSGRGNFSTEGCGCVCEPGWKGPNCSEPECPGNCHLRGRCIDGQCICDDGFTGEDCSQLACPSDCNDQGKCVNGVCICFEGYAGADCSREICPVPCSEEHGTCVDGLCVCHDGFAGDDCNKPLCLNNCYNRGRCVENECVCDEGFTGEDCSELICPNDCFDRGRCINGTCYCEEGFTGEDCGKPTCPHACHTQGRCEEGQCVCDEGFAGVDCSEKRCPADCHNRGRCVDGRCECDDGFTGADCGELKCPNGCSGHGRCVNGQCVCDEGYTGEDCSQLRCPNDCHSRGRCVEGKCVCEQGFKGYDCSDMSCPNDCHQHGRCVNGMCVCDDGYTGEDCRDRQCPRDCSNRGLCVDGQCVCEDGFTGPDCAELSCPNDCHGQGRCVNGQCVCHEGFMGKDCKEQRCPSDCHGQGRCVDGQCICHEGFTGLDCGQHSCPSDCNNLGQCVSGRCICNEGYSGEDCSEVSPPKDLVVTEVTEETVNLAWDNEMRVTEYLVVYTPTHEGGLEMQFRVPGDQTSTIIQELEPGVEYFIRVFAILENKKSIPVSARVATYLPAPEGLKFKSIKETSVEVEWDPLDIAFETWEIIFRNMNKEDEGEITKSLRRPETSYRQTGLAPGQEYEISLHIVKNNTRGPGLKRVTTTRLDAPSQIEVKDVTDTTALITWFKPLAEIDGIELTYGIKDVPGDRTTIDLTEDENQYSIGNLKPDTEYEVSLISRRGDMSSNPAKETFTTGLDAPRNLRRVSQTDNSITLEWRNGKAAIDSYRIKYAPISGGDHAEVDVPKSQQATTKTTLTGLRPGTEYGIGVSAVKEDKESNPATINAATELDTPKDLQVSETAETSLTLLWKTPLAKFDRYRLNYSLPTGQWVGVQLPRNTTSYVLRGLEPGQEYNVLLTAEKGRHKSKPARVKASTEQAPELENLTVTEVGWDGLRLNWTAADQAYEHFIIQVQEANKVEAARNLTVPGSLRAVDIPGLKAATPYTVSIYGVIQGYRTPVLSAEASTGETPNLGEVVVAEVGWDALKLNWTAPEGAYEYFFIQVQEADTVEAAQNLTVPGGLRSTDLPGLKAATHYTITIRGVTQDFSTTPLSVEVLTEEVPDMGNLTVTEVSWDALRLNWTTPDGTYDQFTIQVQEADQVEEAHNLTVPGSLRSMEIPGLRAGTPYTVTLHGEVRGHSTRPLAVEVVTEDLPQLGDLAVSEVGWDGLRLNWTAADNAYEHFVIQVQEVNKVEAAQNLTLPGSLRAVDIPGLEAATPYRVSIYGVIRGYRTPVLSAEASTAKEPEIGNLNVSDITPESFNLSWMATDGIFETFTIEIIDSNRLLETVEYNISGAERTAHISGLPPSTDFIVYLSGLAPSIRTKTISATATTEALPLLENLTISDINPYGFTVSWMASENAFDSFLVTVVDSGKLLDPQEFTLSGTQRKLELRGLITGIGYEVMVSGFTQGHQTKPLRAEIVTEAEPEVDNLLVSDATPDGFRLSWTADEGVFDNFVLKIRDTKKQSEPLEITLLAPERTRDITGLREATEYEIELYGISKGRRSQTVSAIATTAMGSPKEVIFSDITENSATVSWRAPTAQVESFRITYVPITGGTPSMVTVDGTKTQTRLVKLIPGVEYLVSIIAMKGFEESEPVSGSFTTALDGPSGLVTANITDSEALARWQPAIATVDSYVISYTGEKVPEITRTVSGNTVEYALTDLEPATEYTLRIFAEKGPQKSSTITAKFTTDLDSPRDLTATEVQSETALLTWRPPRASVTGYLLVYESVDGTVKEVIVGPDTTSYSLADLSPSTHYTAKIQALNGPLRSNMIQTIFTTIGLLYPFPKDCSQAMLNGDTTSGLYTIYLNGDKAEALEVFCDMTSDGGGWIVFLRRKNGRENFYQNWKAYAAGFGDRREEFWLGLDNLNKITAQGQYELRVDLRDHGETAFAVYDKFSVGDAKTRYKLKVEGYSGTAGDSMAYHNGRSFSTFDKDTDSAITNCALSYKGAFWYRNCHRVNLMGRYGDNNHSQGVNWFHWKGHEHSIQFAEMKLRPSNFRNLEGRRKRA

SEQ ID NO: 807 - protein, 30 aa, Homo sapiens
  trimerization domain of human tenascin C (TNC)
ACGCAAAPDVKELLSRLEELENLVSSLREQ

SEQ ID NO: 808 - protein, 106 aa, Artificial Sequence
  EHD2 dimerization domain
DFTPPTVKILQSSCDGGGHFPPTIQLLCLVSGYTPGTINITWLEDGQVMDVDLSTASTTQEGELASTQSELTLSQKHWLSDRTYTCQVTYQGHTFEDSTKKCADSN

SEQ ID NO: 809 - protein, 27 aa, Artificial Sequence
  Peptide linker between EHD2 and scTNFR2 in EHD2-scTNFR2
GGGSGGGSGGGSGGGSGGGSGGSEFLA

SEQ ID NO: 810 - protein, 605 aa, Artificial Sequence
  EHD2-scTNFR2
DFTPPTVKILQSSCDGGGHFPPTIQLLCLVSGYTPGTINITWLEDGQVMDVDLSTASTTQEGELASTQSELTLSQKHWLSDRTYTCQVTYQGHTFEDSTKKCADSNGGGSGGGSGGGSGGGSGGGSGGSEFLASSRTPSDKPVAHVVANPQAEGQLQWLNRRANALLANGVELRDNQLVVPSEGLYLIYSQVLFKGQGCPSTHVLLTHTISRIAVSYQTKVNLLSAIKSPCQRETPEGAEAKPWYEPIYLGGVFQLEKGDRLSAEINRPDYLNFRESGQVYFGIIALGGGGSSSRTPSDKPVAHVVANPQAEGQLQWLNRRANALLANGVELRDNQLVVPSEGLYLIYSQVLFKGQGCPSTHVLLTHTISRIAVSYQTKVNLLSAIKSPCQRETPEGAEAKPWYEPIYLGGVFQLEKGDRLSAEINRPDYLNFRESGQVYFGIIALGGGGSSSRTPSDKPVAHVVANPQAEGQLQWLNRRANALLANGVELRDNQLVVPSEGLYLIYSQVLFKGQGCPSTHVLLTHTISRIAVSYQTKVNLLSAIKSPCQRETPEGAEAKPWYEPIYLGGVFQLEKGDRLSAEINRPDYLNFRESGQVYFGIIAL

SEQ ID NO: 811 - protein, 111 aa, Artificial Sequence
  MHD2 (IgM dimerization domain)
AELPPKVSVFVPPRDGFFGNPRKSKLICQATGFSPRQIQVSWLREGKQVGSGVTTDQVQAEAKESGPTTYKVTSTLTIKESDWLGQSMFTCRVDHRGLTFQQNASSMCVPD

SEQ ID NO: 812 - protein, 31 aa, Artificial Sequence
  stalk region of TNF that can be used as a linker in scTNFR2-Fc
GPQREEFPRDLSLISPLAQAVRSSSRTPSDK

SEQ ID NO: 813 - protein, 6 aa, Artificial Sequence
  partial trastuzumab hinge sequence
SCDKTH

SEQ ID NO: 814 - protein, 15 aa, Artificial Sequence
  trastuzumab hinge sequence
EPKSCDKTHTCPPCP

SEQ ID NO: 815 - protein, 12 aa, Artificial Sequence
  nivolumab hinge sequence
ESKYGPPCPPCP

SEQ ID NO: 816 - protein, 4 aa, Artificial Sequence
  GS linker
GSGS

SEQ ID NO: 817 - protein, 5 aa, Artificial Sequence
  GS linker
GGGGS

SEQ ID NO: 818 - protein, 15 aa, Artificial Sequence
  GS linker
GGGGSGGGGSGGGGS

SEQ ID NO: 819 - protein, 20 aa, Artificial Sequence
  GS linker
GGGGSGGGGSGGGGSGGGGS

SEQ ID NO: 820 - protein, 8 aa, Artificial Sequence
  GS linker
GSGGSSGG

SEQ ID NO: 821 - protein, 12 aa, Artificial Sequence
  GS linker
GSSSGSGSGSSG

SEQ ID NO: 822 - protein, 13 aa, Artificial Sequence
  GS linker
GSSSGSGSGSSGG

SEQ ID NO: 823 - protein, 6 aa, Artificial Sequence
  GS linker
GGSSGG

SEQ ID NO: 824 - protein, 13 aa, Artificial Sequence
  GS linker
GGSSGGSGGSSSG

SEQ ID NO: 825 - protein, 18 aa, Artificial Sequence
  GS linker
GSSSGSGSGGSSSGSGSG

SEQ ID NO: 826 - protein, 18 aa, Artificial Sequence
  GS linker
GGSSGGSSGGGSSGGSSG

SEQ ID NO: 827 - protein, 6 aa, Artificial Sequence
  GS linker
GSSSGS

SEQ ID NO: 828 - protein, 12 aa, Artificial Sequence
  linker sequence
GSAGSAAGSGEF

SEQ ID NO: 829 - protein, 18 aa, Artificial Sequence
  linker sequence
KESGSVSSEQLAQFRSLD

SEQ ID NO: 830 - protein, 14 aa, Artificial Sequence
  linker sequence
EGKSSGSGSESKST

SEQ ID NO: 831 - protein, 5 aa, Artificial Sequence
  Alpha helix-forming linker, (EAAAK)n
  REPEAT (1)...(5): occuring n times, where n= 1 to 10
EAAAK

SEQ ID NO: 832 - protein, 7 aa, Artificial Sequence
  rigid linker, A(EAAAK)nA, where n = 2 to 5
  REPEAT (2)...(6): occurring 2, 3, 4, or 5 times
AEAAAKA

SEQ ID NO: 833 - protein, 18 aa, Artificial Sequence
  C-terminal extension from human IgG linker
ELQLEESSAEAQDGELDG

SEQ ID NO: 834 - protein, 14 aa, Artificial Sequence
  C-terminal extension from human IgG variant linker
ELQLEESSAEAQGG

SEQ ID NO: 835 - protein, 20 aa, Artificial Sequence
  human immunoglobulin light chain kappa leader signal peptide sequence; human Ig kappa chain V-III region signal peptide (IgGkSP)
METDTLLLWVLLLWVPGSTG

SEQ ID NO: 836 - protein, 6 aa, Artificial Sequence
  6xHis tag
HHHHHH

SEQ ID NO: 837 - protein, 100 aa, Artificial Sequence
  SUMO sequence
GSLQDSEVNQEAKPEVKPEVKPETHINLKVSDGSSEIFFKIKKTTPLRRLMEAFAKRQGKEMDSLRFLYDGIRIQADQAPEDLDMEDNDIIEAHREQIGG

SEQ ID NO: 838 - protein, 108 aa, Artificial Sequence
  His tag-SUMO sequence
MGHHHHHHGSLQDSEVNQEAKPEVKPEVKPETHINLKVSDGSSEIFFKIKKTTPLRRLMEAFAKRQGKEMDSLRFLYDGIRIQADQAPEDLDMEDNDIIEAHREQIGG

SEQ ID NO: 839 - protein, 5 aa, Artificial Sequence
  human TNFR2 epitope
KCSPG

SEQ ID NO: 840 - protein, 5 aa, Artificial Sequence
  human TNFR2 epitope
KCRPG

SEQ ID NO: 841 - protein, 59 aa, Artificial Sequence
  human TNFR2 epitope
CGSRCSSDQVETQACTREQNRICTCRPGWYCALSKQEGCRLCAPLRKCRPGFGVARPGT

SEQ ID NO: 842 - protein, 40 aa, Artificial Sequence
  human TNFR2 epitope
TREQNRICTCRPGWYCALSKQEGCRLCAPLRKCRPGFGVA

SEQ ID NO: 843 - protein, 28 aa, Artificial Sequence
  human TNFR2 epitope
NRICTCRPGWYCALSKQEGCRLCAPLRK

SEQ ID NO: 844 - protein, 15 aa, Artificial Sequence
  human TNFR2 epitope
PGWYCALSKQEGCRL

SEQ ID NO: 845 - protein, 17 aa, Artificial Sequence
  human TNFR2 epitope
CGSRCSSDQVETQACTR

SEQ ID NO: 846 - protein, 7 aa, Artificial Sequence
  human TNFR2 epitope
SSDQVET

SEQ ID NO: 847 - protein, 20 aa, Artificial Sequence
  human TNFR2 epitope
QTAQMCCSKCSPGQHAKVFC

SEQ ID NO: 848 - protein, 20 aa, Artificial Sequence
  human TNFR2 epitope
KQEGCRLCAPLRKCRPGFGV

SEQ ID NO: 849 - protein, 38 aa, Artificial Sequence
  human TNFR2 epitope
CTREQNRICTCRPGWYCALSKQEGCRLCAPLRKCRPGF

SEQ ID NO: 850 - protein, 50 aa, Artificial Sequence
  human TNFR2 epitope
ETQACTREQNRICTCRPGWYCALSKQEGCRLCAPLRKCRPGFGVARPGTE

SEQ ID NO: 851 - protein, 8 aa, Artificial Sequence
  human TNFR2 epitope
CAPLRKCR

SEQ ID NO: 852 - protein, 9 aa, Artificial Sequence
  human TNFR2 epitope
RKCRPGFGV

SEQ ID NO: 853 - protein, 15 aa, Artificial Sequence
  peptide sequence within human TNFR2 that represents epitope that TNFR2 agonist antibodies or fragments thereof can bind to
CRPHQICNVVAIPGN

SEQ ID NO: 854 - protein, 15 aa, Artificial Sequence
  peptide sequence within human TNFR2 that represents epitope that TNFR2 agonist antibodies or fragments thereof can bind to
CRPHQICNVVGAPGN

SEQ ID NO: 855 - protein, 15 aa, Artificial Sequence
  peptide sequence within human TNFR2 that represents epitope that TNFR2 agonist antibodies or fragments thereof can bind to
QEGCRLCAPLAACRP

SEQ ID NO: 856 - protein, 15 aa, Artificial Sequence
  peptide sequence within human TNFR2 that represents epitope that TNFR2 agonist antibodies or fragments thereof can bind to
TFSNTTSSTDAARPH

SEQ ID NO: 857 - protein, 15 aa, Artificial Sequence
  peptide sequence within human TNFR2 that represents epitope that TNFR2 agonist antibodies or fragments thereof can bind to
PSTSFLLPMGPSPPA

SEQ ID NO: 858 - protein, 15 aa, Artificial Sequence
  peptide sequence within human TNFR2 that represents epitope that TNFR2 agonist antibodies or fragments thereof can bind to
QVETQACTREQNRIC

SEQ ID NO: 859 - protein, 15 aa, Artificial Sequence
  peptide sequence within human TNFR2 that represents epitope that TNFR2 agonist antibodies or fragments thereof can bind to
LWNWVPECLSCGSRC

SEQ ID NO: 860 - protein, 15 aa, Artificial Sequence
  peptide sequence within human TNFR2 that represents epitope that TNFR2 agonist antibodies or fragments thereof can bind to
QLWNWVPECLSCGSR

SEQ ID NO: 861 - protein, 15 aa, Artificial Sequence
  peptide sequence within human TNFR2 that represents epitope that TNFR2 agonist antibodies or fragments thereof can bind to
QACTREQNRICTCRP

SEQ ID NO: 862 - protein, 15 aa, Artificial Sequence
  peptide sequence within human TNFR2 that represents epitope that TNFR2 agonist antibodies or fragments thereof can bind to
TFSNTTSSTDICRPH

SEQ ID NO: 863 - protein, 15 aa, Artificial Sequence
  peptide sequence within human TNFR2 that represents epitope that TNFR2 agonist antibodies or fragments thereof can bind to
PGWYCALSKQEGCRL

SEQ ID NO: 864 - protein, 16 aa, Artificial Sequence
  peptide sequence within human TNFR2 that represents epitope that TNFR2 agonist antibodies or fragments thereof can bind to
CQLWNWVPEALAGGSR

SEQ ID NO: 865 - protein, 27 aa, Artificial Sequence
  peptide sequence within human TNFR2 that represents epitope that TNFR2 agonist antibodies or fragments thereof can bind to
  VARIANT (3)...(3): Xaa is Cys residue protected with ACM protecting group
  VARIANT (25)...(25): Xaa is Cys residue protected with ACM protecting group
LSXGSRCSSDQGGSGGREQNRICTXRP

SEQ ID NO: 866 - protein, 15 aa, Artificial Sequence
  peptide sequence within human TNFR2 that represents epitope that TNFR2 agonist antibodies or fragments thereof can bind to
WNWVPECLSCAARCS

SEQ ID NO: 867 - protein, 27 aa, Artificial Sequence
  peptide sequence within human TNFR2 that represents epitope that TNFR2 agonist antibodies or fragments thereof can bind to
  VARIANT (8)...(8): Xaa is Cys residue protected with ACM protecting group
  VARIANT (27)...(27): Xaa is Cys residue protected with ACM protecting group
LWNWVPEXLSCGGSGGQACTREQNRIX

SEQ ID NO: 868 - protein, 15 aa, Artificial Sequence
  peptide sequence within human TNFR2 that represents epitope that TNFR2 agonist antibodies or fragments thereof can bind to
PLRKCRPGFGVARPG

SEQ ID NO: 869 - protein, 27 aa, Artificial Sequence
  peptide sequence within human TNFR2 that represents epitope that TNFR2 agonist antibodies or fragments thereof can bind to
  VARIANT (1)...(1): Xaa is Cys residue protected with ACM protecting group
  VARIANT (25)...(25): Xaa is Cys residue protected with ACM protecting group
XGSRCSSDQVEGGSGGREQNRICTXRP

SEQ ID NO: 870 - protein, 27 aa, Artificial Sequence
  peptide sequence within human TNFR2 that represents epitope that TNFR2 agonist antibodies or fragments thereof can bind to
  VARIANT (3)...(3): Xaa is Cys residue protected with ACM protecting group
  VARIANT (6)...(6): Xaa is Cys residue protected with ACM protecting group
  VARIANT (25)...(25): Xaa is Cys residue protected with ACM protecting group
PEXLSXGSRCSGGSGGREQNRICTXRP

SEQ ID NO: 871 - protein, 27 aa, Artificial Sequence
  peptide sequence within human TNFR2 that represents epitope that TNFR2 agonist antibodies or fragments thereof can bind to
  VARIANT (8)...(8): Xaa is Cys residue protected with ACM protecting group
  VARIANT (26)...(26): Xaa is Cys residue protected with ACM protecting group
LWNWVPEXLSCGGSGGACTREQNRIXT

SEQ ID NO: 872 - protein, 15 aa, Artificial Sequence
  peptide sequence within human TNFR2 that represents epitope that TNFR2 agonist antibodies or fragments thereof can bind to
QLWNWVPECLAAGSR

SEQ ID NO: 873 - protein, 27 aa, Artificial Sequence
  peptide sequence within human TNFR2 that represents epitope that TNFR2 agonist antibodies or fragments thereof can bind to
  VARIANT (11)...(11): Xaa is Cys residue protected with ACM protecting group
  VARIANT (25)...(25): Xaa is Cys residue protected with ACM protecting group
CSSDQVETQAXGGSGGREQNRICTXRP

SEQ ID NO: 874 - protein, 15 aa, Artificial Sequence
  peptide sequence within human TNFR2 that represents epitope that TNFR2 agonist antibodies or fragments thereof can bind to
EQNRICTCRPAAYCA

SEQ ID NO: 875 - protein, 15 aa, Artificial Sequence
  peptide sequence within human TNFR2 that represents epitope that TNFR2 agonist antibodies or fragments thereof can bind to
TTSSTDICRPHQICN

SEQ ID NO: 876 - protein, 15 aa, Artificial Sequence
  peptide sequence within human TNFR2 that represents epitope that TNFR2 agonist antibodies or fragments thereof can bind to
ACTREQNRICTCRPG

SEQ ID NO: 877 - protein, 16 aa, Artificial Sequence
  peptide sequence within human TNFR2 that represents epitope that TNFR2 agonist antibodies or fragments thereof can bind to
CQLWNWVPEALSAGSR

SEQ ID NO: 878 - protein, 15 aa, Artificial Sequence
  peptide sequence within human TNFR2 that represents epitope that TNFR2 agonist antibodies or fragments thereof can bind to
RPHQICNVVAIPGNA

SEQ ID NO: 879 - protein, 27 aa, Artificial Sequence
  peptide sequence within human TNFR2 that represents epitope that TNFR2 agonist antibodies or fragments thereof can bind to
  VARIANT (25)...(25): Xaa is Cys residue protected with ACM protecting group
SRCSSDQVETQGGSGGREQNRICTXRP

SEQ ID NO: 880 - protein, 27 aa, Artificial Sequence
  peptide sequence within human TNFR2 that represents epitope that TNFR2 agonist antibodies or fragments thereof can bind to
  VARIANT (25)...(25): Xaa is Cys residue protected with ACM protecting group
GSRCSSDQVETGGSGGREQNRICTXRP

SEQ ID NO: 881 - protein, 27 aa, Artificial Sequence
  peptide sequence within human TNFR2 that represents epitope that TNFR2 agonist antibodies or fragments thereof can bind to
  VARIANT (3)...(3): Xaa is Cys residue protected with ACM protecting group
  VARIANT (24)...(24): Xaa is Cys residue protected with ACM protecting group
LSXGSRCSSDQGGSGGEQNRICTXRPG

SEQ ID NO: 882 - protein, 27 aa, Artificial Sequence
  peptide sequence within human TNFR2 that represents epitope that TNFR2 agonist antibodies or fragments thereof can bind to
  VARIANT (7)...(7): Xaa is Cys residue protected with ACM protecting group
QEGCRLXAPLRGGSGGCRPGFGVARPG

SEQ ID NO: 883 - protein, 15 aa, Artificial Sequence
  peptide sequence within human TNFR2 that represents epitope that TNFR2 agonist antibodies or fragments thereof can bind to
FSNTTSSTDICRPHQ

SEQ ID NO: 884 - protein, 15 aa, Artificial Sequence
  peptide sequence within human TNFR2 that represents epitope that TNFR2 agonist antibodies or fragments thereof can bind to
LWNWVPECLSAASRC

SEQ ID NO: 885 - protein, 15 aa, Artificial Sequence
  peptide sequence within human TNFR2 that represents epitope that TNFR2 agonist antibodies or fragments thereof can bind to
QTAQMCCSKCSPGQH

SEQ ID NO: 886 - protein, 27 aa, Artificial Sequence
  peptide sequence within human TNFR2 that represents epitope that TNFR2 agonist antibodies or fragments thereof can bind to
  VARIANT (2)...(2): Xaa is Cys residue protected with ACM protecting group
  VARIANT (5)...(5): Xaa is Cys residue protected with ACM protecting group
  VARIANT (25)...(25): Xaa is Cys residue protected with ACM protecting group
EXLSXGSRCSSGGSGGREQNRICTXRP

SEQ ID NO: 887 - protein, 33 aa, Artificial Sequence
  peptide sequence within human TNFR2 that represents epitope that TNFR2 agonist antibodies or fragments thereof can bind to
  VARIANT (7)...(7): Xaa is Cys residue protected with ACM protecting group
  VARIANT (9)...(9): Xaa is Cys residue protected with ACM protecting group
  VARIANT (15)...(15): Xaa is Cys residue protected with ACM protecting group
  VARIANT (25)...(25): Xaa is Cys residue protected with ACM protecting group
CEQNRIXTXRPGWYXACNASMDAVXTSTSPTRC

SEQ ID NO: 888 - protein, 27 aa, Artificial Sequence
  peptide sequence within human TNFR2 that represents epitope that TNFR2 agonist antibodies or fragments thereof can bind to
  VARIANT (4)...(4): Xaa is Cys residue protected with ACM protecting group
  VARIANT (7)...(7): Xaa is Cys residue protected with ACM protecting group
  VARIANT (25)...(25): Xaa is Cys residue protected with ACM protecting group
VPEXLSXGSRCGGSGGREQNRICTXRP

SEQ ID NO: 889 - protein, 27 aa, Artificial Sequence
  peptide sequence within human TNFR2 that represents epitope that TNFR2 agonist antibodies or fragments thereof can bind to
  VARIANT (7)...(7): Xaa is Cys residue protected with ACM protecting group
  VARIANT (27)...(27): Xaa is Cys residue protected with ACM protecting group
WNWVPEXLSCGGGSGGQACTREQNRIX

SEQ ID NO: 890 - protein, 27 aa, Artificial Sequence
  peptide sequence within human TNFR2 that represents epitope that TNFR2 agonist antibodies or fragments thereof can bind to
  VARIANT (8)...(8): Xaa is Cys residue protected with ACM protecting group
LWNWVPEXLSCGGSGGTQACTREQNRI

SEQ ID NO: 891 - protein, 27 aa, Artificial Sequence
  peptide sequence within human TNFR2 that represents epitope that TNFR2 agonist antibodies or fragments thereof can bind to
  VARIANT (4)...(4): Xaa is Cys residue protected with ACM protecting group
  VARIANT (7)...(7): Xaa is Cys residue protected with ACM protecting group
  VARIANT (19)...(19): Xaa is Cys residue protected with ACM protecting group
VPEXLSXGSRCGGSGGQAXTREQNRIC

SEQ ID NO: 892 - protein, 27 aa, Artificial Sequence
  peptide sequence within human TNFR2 that represents epitope that TNFR2 agonist antibodies or fragments thereof can bind to
  VARIANT (2)...(2): Xaa is Cys residue protected with ACM protecting group
  VARIANT (25)...(25): Xaa is Cys residue protected with ACM protecting group
SXGSRCSSDQVGGSGGREQNRICTXRP

SEQ ID NO: 893 - protein, 27 aa, Artificial Sequence
  peptide sequence within human TNFR2 that represents epitope that TNFR2 agonist antibodies or fragments thereof can bind to
  VARIANT (1)...(1): Xaa is Cys residue protected with ACM protecting group
  VARIANT (24)...(24): Xaa is Cys residue protected with ACM protecting group
XGSRCSSDQVEGGSGGEQNRICTXRPG

SEQ ID NO: 894 - protein, 15 aa, Artificial Sequence
  peptide sequence within human TNFR2 that represents epitope that TNFR2 agonist antibodies or fragments thereof can bind to
ACTREQNRICAARPG

SEQ ID NO: 895 - protein, 27 aa, Artificial Sequence
  peptide sequence within human TNFR2 that represents epitope that TNFR2 agonist antibodies or fragments thereof can bind to
  VARIANT (2)...(2): Xaa is Cys residue protected with ACM protecting group
  VARIANT (24)...(24): Xaa is Cys residue protected with ACM protecting group
SXGSRCSSDQVGGSGGEQNRICTXRPG

SEQ ID NO: 896 - protein, 15 aa, Artificial Sequence
  peptide sequence within human TNFR2 that represents epitope that TNFR2 agonist antibodies or fragments thereof can bind to
PLRKCRPGFGAGRPG

SEQ ID NO: 897 - protein, 15 aa, Artificial Sequence
  peptide sequence within human TNFR2 that represents epitope that TNFR2 agonist antibodies or fragments thereof can bind to
ICRPHQICNVAGIPG

SEQ ID NO: 898 - protein, 15 aa, Artificial Sequence
  peptide sequence within human TNFR2 that represents epitope that TNFR2 agonist antibodies or fragments thereof can bind to
GWYCALSKQEGCRLC

SEQ ID NO: 899 - protein, 15 aa, Artificial Sequence
  peptide sequence within human TNFR2 that represents epitope that TNFR2 agonist antibodies or fragments thereof can bind to
QACTREQNRIAACRP

SEQ ID NO: 900 - protein, 15 aa, Artificial Sequence
  peptide sequence within human TNFR2 that represents epitope that TNFR2 agonist antibodies or fragments thereof can bind to
WNWVPECLSCGSRCS

SEQ ID NO: 901 - protein, 27 aa, Artificial Sequence
  peptide sequence within human TNFR2 that represents epitope that TNFR2 agonist antibodies or fragments thereof can bind to
  VARIANT (1)...(1): Xaa is Cys residue protected with ACM protecting group
  VARIANT (4)...(4): Xaa is Cys residue protected with ACM protecting group
  VARIANT (23)...(23): Xaa is Cys residue protected with ACM protecting group
XLSXGSRCSSDGGSGGQNRICTXRPGW

SEQ ID NO: 902 - protein, 27 aa, Artificial Sequence
  peptide sequence within human TNFR2 that represents epitope that TNFR2 agonist antibodies or fragments thereof can bind to
  VARIANT (4)...(4): Xaa is Cys residue protected with ACM protecting group
  VARIANT (11)...(11): Xaa is Cys residue protected with ACM protecting group
  VARIANT (27)...(27): Xaa is Cys residue protected with ACM protecting group
VPEXLSCGSRXGGSGGQACTREQNRIX

SEQ ID NO: 903 - protein, 27 aa, Artificial Sequence
  peptide sequence within human TNFR2 that represents epitope that TNFR2 agonist antibodies or fragments thereof can bind to
  VARIANT (1)...(1): Xaa is Cys residue protected with ACM protecting group
  VARIANT (4)...(4): Xaa is Cys residue protected with ACM protecting group
  VARIANT (25)...(25): Xaa is Cys residue protected with ACM protecting group
XLSXGSRCSSDGGSGGREQNRICTXRP

SEQ ID NO: 904 - protein, 27 aa, Artificial Sequence
  peptide sequence within human TNFR2 that represents epitope that TNFR2 agonist antibodies or fragments thereof can bind to
  VARIANT (6)...(6): Xaa is Cys residue protected with ACM protecting group
EGCRLXAPLRKGGSGGCRPGFGVARPG

SEQ ID NO: 905 - protein, 27 aa, Artificial Sequence
  peptide sequence within human TNFR2 that represents epitope that TNFR2 agonist antibodies or fragments thereof can bind to
  VARIANT (19)...(19): Xaa is Cys residue protected with ACM protecting group
  VARIANT (22)...(22): Xaa is Cys residue protected with ACM protecting group
APEPGSTCRLRGGSGGMCXSKXSPGQH

SEQ ID NO: 906 - protein, 27 aa, Artificial Sequence
  peptide sequence within human TNFR2 that represents epitope that TNFR2 agonist antibodies or fragments thereof can bind to
  VARIANT (8)...(8): Xaa is Cys residue protected with ACM protecting group
  VARIANT (25)...(25): Xaa is Cys residue protected with ACM protecting group
  VARIANT (27)...(27): Xaa is Cys residue protected with ACM protecting group
LWNWVPEXLSCGGSGGCTREQNRIXTX

SEQ ID NO: 907 - protein, 27 aa, Artificial Sequence
  peptide sequence within human TNFR2 that represents epitope that TNFR2 agonist antibodies or fragments thereof can bind to
  VARIANT (8)...(8): Xaa is Cys residue protected with ACM protecting group
KQEGCRLXAPLGGSGGCRPGFGVARPG

SEQ ID NO: 908 - protein, 27 aa, Artificial Sequence
  peptide sequence within human TNFR2 that represents epitope that TNFR2 agonist antibodies or fragments thereof can bind to
  VARIANT (1)...(1): Xaa is Cys residue protected with ACM protecting group
XALSKQEGCRLGGSGGCRPGFGVARPG

SEQ ID NO: 909 - protein, 27 aa, Artificial Sequence
  peptide sequence within human TNFR2 that represents epitope that TNFR2 agonist antibodies or fragments thereof can bind to
  VARIANT (3)...(3): Xaa is Cys residue protected with ACM protecting group
WYXALSKQEGCGGSGGCRPGFGVARPG

SEQ ID NO: 910 - protein, 27 aa, Artificial Sequence
  peptide sequence within human TNFR2 that represents epitope that TNFR2 agonist antibodies or fragments thereof can bind to
  VARIANT (10)...(10): Xaa is Cys residue protected with ACM protecting group
LSKQEGCRLXAGGSGGCRPGFGVARPG

SEQ ID NO: 911 - protein, 27 aa, Artificial Sequence
  peptide sequence within human TNFR2 that represents epitope that TNFR2 agonist antibodies or fragments thereof can bind to
  VARIANT (24)...(24): Xaa is Cys residue protected with ACM protecting group
GSRCSSDQVETGGSGGEQNRICTXRPG

SEQ ID NO: 912 - protein, 27 aa, Artificial Sequence
  peptide sequence within human TNFR2 that represents epitope that TNFR2 agonist antibodies or fragments thereof can bind to
  VARIANT (11)...(11): Xaa is Cys residue protected with ACM protecting group
ALSKQEGCRLXGGSGGCRPGFGVARPG

SEQ ID NO: 913 - protein, 15 aa, Artificial Sequence
  peptide sequence within human TNFR2 that represents epitope that TNFR2 agonist antibodies or fragments thereof can bind to
RPGWYCALSKQEGCR

SEQ ID NO: 914 - protein, 15 aa, Artificial Sequence
  peptide sequence within human TNFR2 that represents epitope that TNFR2 agonist antibodies or fragments thereof can bind to
AFTPYAPEPGSTCRL

SEQ ID NO: 915 - protein, 27 aa, Artificial Sequence
  peptide sequence within human TNFR2 that represents epitope that TNFR2 agonist antibodies or fragments thereof can bind to
  VARIANT (25)...(25): Xaa is Cys residue protected with ACM protecting group
RCSSDQVETQAGGSGGREQNRICTXRP

SEQ ID NO: 916 - protein, 27 aa, Artificial Sequence
  peptide sequence within human TNFR2 that represents epitope that TNFR2 agonist antibodies or fragments thereof can bind to
  VARIANT (7)...(7): Xaa is Cys residue protected with ACM protecting group
  VARIANT (26)...(26): Xaa is Cys residue protected with ACM protecting group
WNWVPEXLSCGGGSGGACTREQNRIXT

SEQ ID NO: 917 - protein, 27 aa, Artificial Sequence
  peptide sequence within human TNFR2 that represents epitope that TNFR2 agonist antibodies or fragments thereof can bind to
  VARIANT (6)...(6): Xaa is Cys residue protected with ACM protecting group
TSDVVXKPCAPGGSGGTTSSTDICRPH

SEQ ID NO: 918 - protein, 15 aa, Artificial Sequence
  peptide sequence within human TNFR2 that represents epitope that TNFR2 agonist antibodies or fragments thereof can bind to
ICRPHQICNVVAIPG

SEQ ID NO: 919 - protein, 27 aa, Artificial Sequence
  peptide sequence within human TNFR2 that represents epitope that TNFR2 agonist antibodies or fragments thereof can bind to
  VARIANT (9)...(9): Xaa is Cys residue protected with ACM protecting group
  VARIANT (20)...(20): Xaa is Cys residue protected with ACM protecting group
RLCAPLRKXRPGGSGGCKPXAPGTFSN

SEQ ID NO: 920 - protein, 15 aa, Artificial Sequence
  peptide sequence within human TNFR2 that represents epitope that TNFR2 agonist antibodies or fragments thereof can bind to
PTRSMAPGAVHLPQP

SEQ ID NO: 921 - protein, 27 aa, Artificial Sequence
  peptide sequence within human TNFR2 that represents epitope that TNFR2 agonist antibodies or fragments thereof can bind to
  VARIANT (19)...(19): Xaa is Cys residue protected with ACM protecting group
  VARIANT (22)...(22): Xaa is Cys residue protected with ACM protecting group
YAPEPGSTCRLGGSGGMCXSKXSPGQH

SEQ ID NO: 922 - protein, 27 aa, Artificial Sequence
  peptide sequence within human TNFR2 that represents epitope that TNFR2 agonist antibodies or fragments thereof can bind to
  VARIANT (5)...(5): Xaa is Cys residue protected with ACM protecting group
  VARIANT (27)...(27): Xaa is Cys residue protected with ACM protecting group
WVPEXLSCGSRGGSGGQACTREQNRIX

SEQ ID NO: 923 - protein, 27 aa, Artificial Sequence
  peptide sequence within human TNFR2 that represents epitope that TNFR2 agonist antibodies or fragments thereof can bind to
  VARIANT (3)...(3): Xaa is Cys residue protected with ACM protecting group
  VARIANT (6)...(6): Xaa is Cys residue protected with ACM protecting group
  VARIANT (18)...(18): Xaa is Cys residue protected with ACM protecting group
PEXLSXGSRCSGGSGGAXTREQNRICT

SEQ ID NO: 924 - protein, 27 aa, Artificial Sequence
  peptide sequence within human TNFR2 that represents epitope that TNFR2 agonist antibodies or fragments thereof can bind to
  VARIANT (2)...(2): Xaa is Cys residue protected with ACM protecting group
  VARIANT (5)...(5): Xaa is Cys residue protected with ACM protecting group
  VARIANT (24)...(24): Xaa is Cys residue protected with ACM protecting group
EXLSXGSRCSSGGSGGEQNRICTXRPG

SEQ ID NO: 925 - protein, 27 aa, Artificial Sequence
  peptide sequence within human TNFR2 that represents epitope that TNFR2 agonist antibodies or fragments thereof can bind to
  VARIANT (3)...(3): Xaa is Cys residue protected with ACM protecting group
  VARIANT (10)...(10): Xaa is Cys residue protected with ACM protecting group
  VARIANT (27)...(27): Xaa is Cys residue protected with ACM protecting group
PEXLSCGSRXSGGSGGQACTREQNRIX

SEQ ID NO: 926 - protein, 27 aa, Artificial Sequence
  peptide sequence within human TNFR2 that represents epitope that TNFR2 agonist antibodies or fragments thereof can bind to
  VARIANT (5)...(5): Xaa is Cys residue protected with ACM protecting group
  VARIANT (26)...(26): Xaa is Cys residue protected with ACM protecting group
WVPEXLSCGSRGGSGGACTREQNRIXT

SEQ ID NO: 927 - protein, 27 aa, Artificial Sequence
  peptide sequence within human TNFR2 that represents epitope that TNFR2 agonist antibodies or fragments thereof can bind to
  VARIANT (19)...(19): Xaa is Cys residue protected with ACM protecting group
  VARIANT (22)...(22): Xaa is Cys residue protected with ACM protecting group
PGSTCRLREYYGGSGGMCXSKXSPGQH

SEQ ID NO: 928 - protein, 15 aa, Artificial Sequence
  peptide sequence within human TNFR2 that represents epitope that TNFR2 agonist antibodies or fragments thereof can bind to
PSTAPSTSFLLPMGP

SEQ ID NO: 929 - protein, 27 aa, Artificial Sequence
  peptide sequence within human TNFR2 that represents epitope that TNFR2 agonist antibodies or fragments thereof can bind to
  VARIANT (23)...(23): Xaa is Cys residue protected with ACM protecting group
RCSSDQVETQAGGSGGQNRICTXRPGW

SEQ ID NO: 930 - protein, 27 aa, Artificial Sequence
  peptide sequence within human TNFR2 that represents epitope that TNFR2 agonist antibodies or fragments thereof can bind to
  VARIANT (3)...(3): Xaa is Cys residue protected with ACM protecting group
  VARIANT (6)...(6): Xaa is Cys residue protected with ACM protecting group
  VARIANT (23)...(23): Xaa is Cys residue protected with ACM protecting group
PEXLSXGSRCSGGSGGQNRICTXRPGW

SEQ ID NO: 931 - protein, 27 aa, Artificial Sequence
  peptide sequence within human TNFR2 that represents epitope that TNFR2 agonist antibodies or fragments thereof can bind to
  VARIANT (11)...(11): Xaa is Cys residue protected with ACM protecting group
  VARIANT (24)...(24): Xaa is Cys residue protected with ACM protecting group
CSSDQVETQAXGGSGGEQNRICTXRPG

SEQ ID NO: 932 - protein, 27 aa, Artificial Sequence
  peptide sequence within human TNFR2 that represents epitope that TNFR2 agonist antibodies or fragments thereof can bind to
  VARIANT (19)...(19): Xaa is Cys residue protected with ACM protecting group
  VARIANT (22)...(22): Xaa is Cys residue protected with ACM protecting group
PYAPEPGSTCRGGSGGMCXSKXSPGQH

SEQ ID NO: 933 - protein, 27 aa, Artificial Sequence
  peptide sequence within human TNFR2 that represents epitope that TNFR2 agonist antibodies or fragments thereof can bind to
  VARIANT (4)...(4): Xaa is Cys residue protected with ACM protecting group
  VARIANT (7)...(7): Xaa is Cys residue protected with ACM protecting group
  VARIANT (18)...(18): Xaa is Cys residue protected with ACM protecting group
VPEXLSXGSRCGGSGGAXTREQNRICT

SEQ ID NO: 934 - protein, 22 aa, Artificial Sequence
  peptide sequence within human TNFR2 that represents epitope that TNFR2 agonist antibodies or fragments thereof can bind to
  VARIANT (11)...(11): Xaa is Cys residue protected with ACM protecting group
  VARIANT (21)...(21): Xaa is Cys residue protected with ACM protecting group
CSSDQVETQAXTREQNRICTXR

SEQ ID NO: 935 - protein, 27 aa, Artificial Sequence
  peptide sequence within human TNFR2 that represents epitope that TNFR2 agonist antibodies or fragments thereof can bind to
  VARIANT (2)...(2): Xaa is Cys residue protected with ACM protecting group
  VARIANT (5)...(5): Xaa is Cys residue protected with ACM protecting group
  VARIANT (19)...(19): Xaa is Cys residue protected with ACM protecting group
EXLSXGSRCSSGGSGGQAXTREQNRIC

SEQ ID NO: 936 - protein, 27 aa, Artificial Sequence
  peptide sequence within human TNFR2 that represents epitope that TNFR2 agonist antibodies or fragments thereof can bind to
  VARIANT (3)...(3): Xaa is Cys residue protected with ACM protecting group
  VARIANT (23)...(23): Xaa is Cys residue protected with ACM protecting group
LSXGSRCSSDQGGSGGQNRICTXRPGW

SEQ ID NO: 937 - protein, 27 aa, Artificial Sequence
  peptide sequence within human TNFR2 that represents epitope that TNFR2 agonist antibodies or fragments thereof can bind to
  VARIANT (1)...(1): Xaa is Cys residue protected with ACM protecting group
  VARIANT (18)...(18): Xaa is Cys residue protected with ACM protecting group
XALSKQEGCRLGGSGGLXAPLRKCRPG

SEQ ID NO: 938 - protein, 27 aa, Artificial Sequence
  peptide sequence within human TNFR2 that represents epitope that TNFR2 agonist antibodies or fragments thereof can bind to
  VARIANT (19)...(19): Xaa is Cys residue protected with ACM protecting group
  VARIANT (22)...(22): Xaa is Cys residue protected with ACM protecting group
PEPGSTCRLREGGSGGMCXSKXSPGQH

SEQ ID NO: 939 - protein, 22 aa, Artificial Sequence
  peptide sequence within human TNFR2 that represents epitope that TNFR2 agonist antibodies or fragments thereof can bind to
  VARIANT (4)...(4): Xaa is Cys residue protected with ACM protecting group
  VARIANT (20)...(20): Xaa is Cys residue protected with ACM protecting group
NRIXTCRPGWYCALSKQEGXRL

SEQ ID NO: 940 - protein, 27 aa, Artificial Sequence
  peptide sequence within human TNFR2 that represents epitope that TNFR2 agonist antibodies or fragments thereof can bind to
  VARIANT (4)...(4): Xaa is Cys residue protected with ACM protecting group
  VARIANT (7)...(7): Xaa is Cys residue protected with ACM protecting group
  VARIANT (24)...(24): Xaa is Cys residue protected with ACM protecting group
VPEXLSXGSRCGGSGGEQNRICTXRPG

SEQ ID NO: 941 - protein, 27 aa, Artificial Sequence
  peptide sequence within human TNFR2 that represents epitope that TNFR2 agonist antibodies or fragments thereof can bind to
  VARIANT (19)...(19): Xaa is Cys residue protected with ACM protecting group
  VARIANT (22)...(22): Xaa is Cys residue protected with ACM protecting group
EPGSTCRLREYGGSGGMCXSKXSPGQH

SEQ ID NO: 942 - protein, 27 aa, Artificial Sequence
  peptide sequence within human TNFR2 that represents epitope that TNFR2 agonist antibodies or fragments thereof can bind to
KPCAPGTFSNTGGSGGTTSSTDICRPH

SEQ ID NO: 943 - protein, 27 aa, Artificial Sequence
  peptide sequence within human TNFR2 that represents epitope that TNFR2 agonist antibodies or fragments thereof can bind to
  VARIANT (24)...(24): Xaa is Cys residue protected with ACM protecting group
SRCSSDQVETQGGSGGEQNRICTXRPG

SEQ ID NO: 944 - protein, 27 aa, Artificial Sequence
  peptide sequence within human TNFR2 that represents epitope that TNFR2 agonist antibodies or fragments thereof can bind to
  VARIANT (7)...(7): Xaa is Cys residue protected with ACM protecting group
  VARIANT (20)...(20): Xaa is Cys residue protected with ACM protecting group
CAPLRKXRPGFGGSGGCKPXAPGTFSN

SEQ ID NO: 945 - protein, 27 aa, Artificial Sequence
  peptide sequence within human TNFR2 that represents epitope that TNFR2 agonist antibodies or fragments thereof can bind to
  VARIANT (4)...(4): Xaa is Cys residue protected with ACM protecting group
  VARIANT (11)...(11): Xaa is Cys residue protected with ACM protecting group
  VARIANT (26)...(26): Xaa is Cys residue protected with ACM protecting group
VPEXLSCGSRXGGSGGACTREQNRIXT

SEQ ID NO: 946 - protein, 27 aa, Artificial Sequence
  peptide sequence within human TNFR2 that represents epitope that TNFR2 agonist antibodies or fragments thereof can bind to
  VARIANT (7)...(7): Xaa is Cys residue protected with ACM protecting group
WNWVPEXLSCGGGSGGTQACTREQNRI

SEQ ID NO: 947 - protein, 27 aa, Artificial Sequence
  peptide sequence within human TNFR2 that represents epitope that TNFR2 agonist antibodies or fragments thereof can bind to
  VARIANT (1)...(1): Xaa is Cys residue protected with ACM protecting group
  VARIANT (4)...(4): Xaa is Cys residue protected with ACM protecting group
  VARIANT (19)...(19): Xaa is Cys residue protected with ACM protecting group
XLSXGSRCSSDGGSGGQAXTREQNRIC

SEQ ID NO: 948 - protein, 27 aa, Artificial Sequence
  peptide sequence within human TNFR2 that represents epitope that TNFR2 agonist antibodies or fragments thereof can bind to
  VARIANT (9)...(9): Xaa is Cys residue protected with ACM protecting group
SKQEGCRLXAPGGSGGCRPGFGVARPG

SEQ ID NO: 949 - protein, 15 aa, Artificial Sequence
  peptide sequence within human TNFR2 that represents epitope that TNFR2 agonist antibodies or fragments thereof can bind to
LRKCRPGFGVARPGT

SEQ ID NO: 950 - protein, 27 aa, Artificial Sequence
  peptide sequence within human TNFR2 that represents epitope that TNFR2 agonist antibodies or fragments thereof can bind to
  VARIANT (5)...(5): Xaa is Cys residue protected with ACM protecting group
  VARIANT (25)...(25): Xaa is Cys residue protected with ACM protecting group
  VARIANT (27)...(27): Xaa is Cys residue protected with ACM protecting group
WVPEXLSCGSRGGSGGCTREQNRIXTX

SEQ ID NO: 951 - protein, 27 aa, Artificial Sequence
  peptide sequence within human TNFR2 that represents epitope that TNFR2 agonist antibodies or fragments thereof can bind to
  VARIANT (3)...(3): Xaa is Cys residue protected with ACM protecting group
  VARIANT (18)...(18): Xaa is Cys residue protected with ACM protecting group
WYXALSKQEGCGGSGGLXAPLRKCRPG

SEQ ID NO: 952 - protein, 33 aa, Artificial Sequence
  peptide sequence within human TNFR2 that represents epitope that TNFR2 agonist antibodies or fragments thereof can bind to
  VARIANT (3)...(3): Xaa is Cys residue protected with ACM protecting group
  VARIANT (6)...(6): Xaa is Cys residue protected with ACM protecting group
  VARIANT (12)...(12): Xaa is Cys residue protected with ACM protecting group
  VARIANT (25)...(25): Xaa is Cys residue protected with ACM protecting group
CGXRLXAPLRKXRPGFCNASMDAVXTSTSPTRC

SEQ ID NO: 953 - protein, 33 aa, Artificial Sequence
  peptide sequence within human TNFR2 that represents epitope that TNFR2 agonist antibodies or fragments thereof can bind to
  VARIANT (4)...(4): Xaa is Cys residue protected with ACM protecting group
  VARIANT (23)...(23): Xaa is Cys residue protected with ACM protecting group
CQIXNVVAIPGNASMDCAPLRKXRPGFGVARPC

SEQ ID NO: 954 - protein, 15 aa, Artificial Sequence
  peptide sequence within human TNFR2 that represents epitope that TNFR2 agonist antibodies or fragments thereof can bind to
VETQACTREQNRICT

SEQ ID NO: 955 - protein, 27 aa, Artificial Sequence
  peptide sequence within human TNFR2 that represents epitope that TNFR2 agonist antibodies or fragments thereof can bind to
  VARIANT (6)...(6): Xaa is Cys residue protected with ACM protecting group
  VARIANT (26)...(26): Xaa is Cys residue protected with ACM protecting group
NWVPEXLSCGSGGSGGACTREQNRIXT

SEQ ID NO: 956 - protein, 27 aa, Artificial Sequence
  peptide sequence within human TNFR2 that represents epitope that TNFR2 agonist antibodies or fragments thereof can bind to
  VARIANT (19)...(19): Xaa is Cys residue protected with ACM protecting group
  VARIANT (22)...(22): Xaa is Cys residue protected with ACM protecting group
TCRLREYYDQTGGSGGMCXSKXSPGQH

SEQ ID NO: 957 - protein, 27 aa, Artificial Sequence
  peptide sequence within human TNFR2 that represents epitope that TNFR2 agonist antibodies or fragments thereof can bind to
  VARIANT (3)...(3): Xaa is Cys residue protected with ACM protecting group
  VARIANT (6)...(6): Xaa is Cys residue protected with ACM protecting group
  VARIANT (24)...(24): Xaa is Cys residue protected with ACM protecting group
PEXLSXGSRCSGGSGGEQNRICTXRPG

SEQ ID NO: 958 - protein, 27 aa, Artificial Sequence
  peptide sequence within human TNFR2 that represents epitope that TNFR2 agonist antibodies or fragments thereof can bind to
  VARIANT (23)...(23): Xaa is Cys residue protected with ACM protecting group
GSRCSSDQVETGGSGGQNRICTXRPGW

SEQ ID NO: 959 - protein, 27 aa, Artificial Sequence
  peptide sequence within human TNFR2 that represents epitope that TNFR2 agonist antibodies or fragments thereof can bind to
  VARIANT (3)...(3): Xaa is Cys residue protected with ACM protecting group
  VARIANT (10)...(10): Xaa is Cys residue protected with ACM protecting group
  VARIANT (26)...(26): Xaa is Cys residue protected with ACM protecting group
PEXLSCGSRXSGGSGGACTREQNRIXT

SEQ ID NO: 960 - protein, 27 aa, Artificial Sequence
  peptide sequence within human TNFR2 that represents epitope that TNFR2 agonist antibodies or fragments thereof can bind to
  VARIANT (7)...(7): Xaa is Cys residue protected with ACM protecting group
  VARIANT (27)...(27): Xaa is Cys residue protected with ACM protecting group
LSCGSRXSSDQGGSGGQACTREQNRIX

SEQ ID NO: 961 - protein, 27 aa, Artificial Sequence
  peptide sequence within human TNFR2 that represents epitope that TNFR2 agonist antibodies or fragments thereof can bind to
PCAPGTFSNTTGGSGGTTSSTDICRPH

SEQ ID NO: 962 - protein, 33 aa, Artificial Sequence
  peptide sequence within human TNFR2 that represents epitope that TNFR2 agonist antibodies or fragments thereof can bind to
  VARIANT (4)...(4): Xaa is Cys residue protected with ACM protecting group
  VARIANT (12)...(12): Xaa is Cys residue protected with ACM protecting group
  VARIANT (14)...(14): Xaa is Cys residue protected with ACM protecting group
  VARIANT (25)...(25): Xaa is Cys residue protected with ACM protecting group
CQAXTREQNRIXTXRPCNASMDAVXTSTSPTRC

SEQ ID NO: 963 - protein, 27 aa, Artificial Sequence
  peptide sequence within human TNFR2 that represents epitope that TNFR2 agonist antibodies or fragments thereof can bind to
  VARIANT (23)...(23): Xaa is Cys residue protected with ACM protecting group
SRCSSDQVETQGGSGGQNRICTXRPGW

SEQ ID NO: 964 - protein, 17 aa, Artificial Sequence
  peptide sequence within human TNFR2 that represents epitope that TNFR2 agonist antibodies or fragments thereof can bind to
CQAATREQNRIGAARPC

SEQ ID NO: 965 - protein, 27 aa, Artificial Sequence
  peptide sequence within human TNFR2 that represents epitope that TNFR2 agonist antibodies or fragments thereof can bind to
  VARIANT (11)...(11): Xaa is Cys residue protected with ACM protecting group
  VARIANT (23)...(23): Xaa is Cys residue protected with ACM protecting group
CSSDQVETQAXGGSGGQNRICTXRPGW

SEQ ID NO: 966 - protein, 33 aa, Artificial Sequence
  peptide sequence within human TNFR2 that represents epitope that TNFR2 agonist antibodies or fragments thereof can bind to
  VARIANT (14)...(14): Xaa is Cys residue protected with ACM protecting group
  VARIANT (25)...(25): Xaa is Cys residue protected with ACM protecting group
CAFTPYAPEPGSTXRLCNASMDAVXTSTSPTRC

SEQ ID NO: 967 - protein, 27 aa, Artificial Sequence
  peptide sequence within human TNFR2 that represents epitope that TNFR2 agonist antibodies or fragments thereof can bind to
  VARIANT (19)...(19): Xaa is Cys residue protected with ACM protecting group
  VARIANT (22)...(22): Xaa is Cys residue protected with ACM protecting group
CRLREYYDQTAGGSGGMCXSKXSPGQH

SEQ ID NO: 968 - protein, 15 aa, Artificial Sequence
  peptide sequence within human TNFR2 that represents epitope that TNFR2 agonist antibodies or fragments thereof can bind to
EGCRLCAPLRKCRPG

SEQ ID NO: 969 - protein, 15 aa, Artificial Sequence
  peptide sequence within human TNFR2 that represents epitope that TNFR2 agonist antibodies or fragments thereof can bind to
AFTPYAPEPGAACRL

SEQ ID NO: 970 - protein, 33 aa, Artificial Sequence
  peptide sequence within human TNFR2 that represents epitope that TNFR2 agonist antibodies or fragments thereof can bind to
  VARIANT (2)...(2): Xaa is Cys residue protected with ACM protecting group
  VARIANT (23)...(23): Xaa is Cys residue protected with ACM protecting group
  VARIANT (24)...(24): Xaa is Cys residue protected with ACM protecting group
  VARIANT (27)...(27): Xaa is Cys residue protected with ACM protecting group
CXEDSTYTQLWNWVPECQTAQMXXSKXSPGQHC

SEQ ID NO: 971 - protein, 27 aa, Artificial Sequence
  peptide sequence within human TNFR2 that represents epitope that TNFR2 agonist antibodies or fragments thereof can bind to
  VARIANT (2)...(2): Xaa is Cys residue protected with ACM protecting group
  VARIANT (9)...(9): Xaa is Cys residue protected with ACM protecting group
  VARIANT (27)...(27): Xaa is Cys residue protected with ACM protecting group
EXLSCGSRXSSGGSGGQACTREQNRIX

SEQ ID NO: 972 - protein, 27 aa, Artificial Sequence
  peptide sequence within human TNFR2 that represents epitope that TNFR2 agonist antibodies or fragments thereof can bind to
  VARIANT (3)...(3): Xaa is Cys residue protected with ACM protecting group
  VARIANT (6)...(6): Xaa is Cys residue protected with ACM protecting group
  VARIANT (17)...(17): Xaa is Cys residue protected with ACM protecting group
  VARIANT (27)...(27): Xaa is Cys residue protected with ACM protecting group
PEXLSXGSRCSGGSGGXTREQNRICTX

SEQ ID NO: 973 - protein, 27 aa, Artificial Sequence
  peptide sequence within human TNFR2 that represents epitope that TNFR2 agonist antibodies or fragments thereof can bind to
  VARIANT (8)...(8): Xaa is Cys residue protected with ACM protecting group
  VARIANT (20)...(20): Xaa is Cys residue protected with ACM protecting group
LCAPLRKXRPGGGSGGCKPXAPGTFSN

SEQ ID NO: 974 - protein, 27 aa, Artificial Sequence
  peptide sequence within human TNFR2 that represents epitope that TNFR2 agonist antibodies or fragments thereof can bind to
  VARIANT (8)...(8): Xaa is Cys residue protected with ACM protecting group
LWNWVPEXLSCGGSGGETQACTREQNR

SEQ ID NO: 975 - protein, 27 aa, Artificial Sequence
  peptide sequence within human TNFR2 that represents epitope that TNFR2 agonist antibodies or fragments thereof can bind to
  VARIANT (6)...(6): Xaa is Cys residue protected with ACM protecting group
  VARIANT (27)...(27): Xaa is Cys residue protected with ACM protecting group
NWVPEXLSCGSGGSGGQACTREQNRIX

SEQ ID NO: 976 - protein, 27 aa, Artificial Sequence
  peptide sequence within human TNFR2 that represents epitope that TNFR2 agonist antibodies or fragments thereof can bind to
  VARIANT (24)...(24): Xaa is Cys residue protected with ACM protecting group
RCSSDQVETQAGGSGGEQNRICTXRPG

SEQ ID NO: 977 - protein, 27 aa, Artificial Sequence
  peptide sequence within human TNFR2 that represents epitope that TNFR2 agonist antibodies or fragments thereof can bind to
  VARIANT (2)...(2): Xaa is Cys residue protected with ACM protecting group
YXALSKQEGCRGGSGGCRPGFGVARPG

SEQ ID NO: 978 - protein, 27 aa, Artificial Sequence
  peptide sequence within human TNFR2 that represents epitope that TNFR2 agonist antibodies or fragments thereof can bind to
  VARIANT (10)...(10): Xaa is Cys residue protected with ACM protecting group
  VARIANT (18)...(18): Xaa is Cys residue protected with ACM protecting group
LSKQEGCRLXAGGSGGLXAPLRKCRPG

SEQ ID NO: 979 - protein, 27 aa, Artificial Sequence
  peptide sequence within human TNFR2 that represents epitope that TNFR2 agonist antibodies or fragments thereof can bind to
  VARIANT (3)...(3): Xaa is Cys residue protected with ACM protecting group
WYXALSKQEGCGGSGGKCRPGFGVARP

SEQ ID NO: 980 - protein, 33 aa, Artificial Sequence
  peptide sequence within human TNFR2 that represents epitope that TNFR2 agonist antibodies or fragments thereof can bind to
  VARIANT (3)...(3): Xaa is Cys residue protected with ACM protecting group
  VARIANT (6)...(6): Xaa is Cys residue protected with ACM protecting group
  VARIANT (12)...(12): Xaa is Cys residue protected with ACM protecting group
  VARIANT (30)...(30): Xaa is Cys residue protected with ACM protecting group
CGXRLXAPLRKXRPGFCAFTPYAPEPGSTXRLC

SEQ ID NO: 981 - protein, 27 aa, Artificial Sequence
  peptide sequence within human TNFR2 that represents epitope that TNFR2 agonist antibodies or fragments thereof can bind to
  VARIANT (1)...(1): Xaa is Cys residue protected with ACM protecting group
  VARIANT (8)...(8): Xaa is Cys residue protected with ACM protecting group
  VARIANT (27)...(27): Xaa is Cys residue protected with ACM protecting group
XLSCGSRXSSDGGSGGQACTREQNRIX

SEQ ID NO: 982 - protein, 33 aa, Artificial Sequence
  peptide sequence within human TNFR2 that represents epitope that TNFR2 agonist antibodies or fragments thereof can bind to
  VARIANT (9)...(9): Xaa is Cys residue protected with ACM protecting group
  VARIANT (25)...(25): Xaa is Cys residue protected with ACM protecting group
CDQVETQAXTREQNRICNASMDAVXTSTSPTRC

SEQ ID NO: 983 - protein, 27 aa, Artificial Sequence
  peptide sequence within human TNFR2 that represents epitope that TNFR2 agonist antibodies or fragments thereof can bind to
  VARIANT (11)...(11): Xaa is Cys residue protected with ACM protecting group
  VARIANT (18)...(18): Xaa is Cys residue protected with ACM protecting group
ALSKQEGCRLXGGSGGLXAPLRKCRPG

SEQ ID NO: 984 - protein, 27 aa, Artificial Sequence
  peptide sequence within human TNFR2 that represents epitope that TNFR2 agonist antibodies or fragments thereof can bind to
  VARIANT (7)...(7): Xaa is Cys residue protected with ACM protecting group
  VARIANT (25)...(25): Xaa is Cys residue protected with ACM protecting group
  VARIANT (27)...(27): Xaa is Cys residue protected with ACM protecting group
WNWVPEXLSCGGGSGGCTREQNRIXTX

SEQ ID NO: 985 - protein, 27 aa, Artificial Sequence
  peptide sequence within human TNFR2 that represents epitope that TNFR2 agonist antibodies or fragments thereof can bind to
  VARIANT (7)...(7): Xaa is Cys residue protected with ACM protecting group
  VARIANT (20)...(20): Xaa is Cys residue protected with ACM protecting group
LSKQEGXRLCAGGSGGCKPXAPGTFSN

SEQ ID NO: 986 - protein, 15 aa, Artificial Sequence
  peptide sequence within human TNFR2 that represents epitope that TNFR2 agonist antibodies or fragments thereof can bind to
CTREQNRICTAAPGW

SEQ ID NO: 987 - protein, 27 aa, Artificial Sequence
  peptide sequence within human TNFR2 that represents epitope that TNFR2 agonist antibodies or fragments thereof can bind to
  VARIANT (2)...(2): Xaa is Cys residue protected with ACM protecting group
  VARIANT (18)...(18): Xaa is Cys residue protected with ACM protecting group
YXALSKQEGCRGGSGGLXAPLRKCRPG

SEQ ID NO: 988 - protein, 27 aa, Artificial Sequence
  peptide sequence within human TNFR2 that represents epitope that TNFR2 agonist antibodies or fragments thereof can bind to
  VARIANT (1)...(1): Xaa is Cys residue protected with ACM protecting group
  VARIANT (10)...(10): Xaa is Cys residue protected with ACM protecting group
  VARIANT (20)...(20): Xaa is Cys residue protected with ACM protecting group
XRLCAPLRKXRGGSGGCKPXAPGTFSN

SEQ ID NO: 989 - protein, 15 aa, Artificial Sequence
  peptide sequence within human TNFR2 that represents epitope that TNFR2 agonist antibodies or fragments thereof can bind to
QNRICTCRPGAACAL

SEQ ID NO: 990 - protein, 33 aa, Artificial Sequence
  peptide sequence within human TNFR2 that represents epitope that TNFR2 agonist antibodies or fragments thereof can bind to
  VARIANT (3)...(3): Xaa is Cys residue protected with ACM protecting group
  VARIANT (6)...(6): Xaa is Cys residue protected with ACM protecting group
  VARIANT (12)...(12): Xaa is Cys residue protected with ACM protecting group
  VARIANT (20)...(20): Xaa is Cys residue protected with ACM protecting group
  VARIANT (28)...(28): Xaa is Cys residue protected with ACM protecting group
  VARIANT (30)...(30): Xaa is Cys residue protected with ACM protecting group
CGXRLXAPLRKXRPGFCQAXTREQNRIXTXRPC

SEQ ID NO: 991 - protein, 27 aa, Artificial Sequence
  peptide sequence within human TNFR2 that represents epitope that TNFR2 agonist antibodies or fragments thereof can bind to
  VARIANT (4)...(4): Xaa is Cys residue protected with ACM protecting group
DVVXKPCAPGTGGSGGTTSSTDICRPH

SEQ ID NO: 992 - protein, 27 aa, Artificial Sequence
  peptide sequence within human TNFR2 that represents epitope that TNFR2 agonist antibodies or fragments thereof can bind to
  VARIANT (5)...(5): Xaa is Cys residue protected with ACM protecting group
  VARIANT (26)...(26): Xaa is Cys residue protected with ACM protecting group
QNRIXTCRPGWGGSGGYCALSKQEGXR

SEQ ID NO: 993 - protein, 15 aa, Artificial Sequence
  peptide sequence within human TNFR2 that represents epitope that TNFR2 agonist antibodies or fragments thereof can bind to
PSTSFLLPMGAAPPA

SEQ ID NO: 994 - protein, 22 aa, Artificial Sequence
  peptide sequence within human TNFR2 that represents epitope that TNFR2 agonist antibodies or fragments thereof can bind to
  VARIANT (6)...(6): Xaa is Cys residue protected with ACM protecting group
EGCRLXAPLRKCRPGFGVARPG

SEQ ID NO: 995 - protein, 27 aa, Artificial Sequence
  peptide sequence within human TNFR2 that represents epitope that TNFR2 agonist antibodies or fragments thereof can bind to
  VARIANT (2)...(2): Xaa is Cys residue protected with ACM protecting group
  VARIANT (5)...(5): Xaa is Cys residue protected with ACM protecting group
  VARIANT (18)...(18): Xaa is Cys residue protected with ACM protecting group
EXLSXGSRCSSGGSGGAXTREQNRICT

SEQ ID NO: 996 - protein, 27 aa, Artificial Sequence
  peptide sequence within human TNFR2 that represents epitope that TNFR2 agonist antibodies or fragments thereof can bind to
  VARIANT (2)...(2): Xaa is Cys residue protected with ACM protecting group
  VARIANT (5)...(5): Xaa is Cys residue protected with ACM protecting group
  VARIANT (23)...(23): Xaa is Cys residue protected with ACM protecting group
EXLSXGSRCSSGGSGGQNRICTXRPGW

SEQ ID NO: 997 - protein, 27 aa, Artificial Sequence
  peptide sequence within human TNFR2 that represents epitope that TNFR2 agonist antibodies or fragments thereof can bind to
  VARIANT (3)...(3): Xaa is Cys residue protected with ACM protecting group
  VARIANT (19)...(19): Xaa is Cys residue protected with ACM protecting group
LSXGSRCSSDQGGSGGQAXTREQNRIC

SEQ ID NO: 998 - protein, 27 aa, Artificial Sequence
  peptide sequence within human TNFR2 that represents epitope that TNFR2 agonist antibodies or fragments thereof can bind to
  VARIANT (19)...(19): Xaa is Cys residue protected with ACM protecting group
  VARIANT (22)...(22): Xaa is Cys residue protected with ACM protecting group
GSTCRLREYYDGGSGGMCXSKXSPGQH

SEQ ID NO: 999 - protein, 15 aa, Artificial Sequence
  peptide sequence within human TNFR2 that represents epitope that TNFR2 agonist antibodies or fragments thereof can bind to
APSTSFLLPMGPSPP

SEQ ID NO: 1000 - protein, 27 aa, Artificial Sequence
  peptide sequence within human TNFR2 that represents epitope that TNFR2 agonist antibodies or fragments thereof can bind to
  VARIANT (6)...(6): Xaa is Cys residue protected with ACM protecting group
NWVPEXLSCGSGGSGGTQACTREQNRI

SEQ ID NO: 1001 - protein, 27 aa, Artificial Sequence
  peptide sequence within human TNFR2 that represents epitope that TNFR2 agonist antibodies or fragments thereof can bind to
  VARIANT (4)...(4): Xaa is Cys residue protected with ACM protecting group
  VARIANT (26)...(26): Xaa is Cys residue protected with ACM protecting group
NRIXTCRPGWYGGSGGYCALSKQEGXR

SEQ ID NO: 1002 - protein, 27 aa, Artificial Sequence
  peptide sequence within human TNFR2 that represents epitope that TNFR2 agonist antibodies or fragments thereof can bind to
KPCAPGTFSNTGGSGGTSSTDICRPHQ

SEQ ID NO: 1003 - protein, 33 aa, Artificial Sequence
  peptide sequence within human TNFR2 that represents epitope that TNFR2 agonist antibodies or fragments thereof can bind to
  VARIANT (7)...(7): Xaa is Cys residue protected with ACM protecting group
  VARIANT (30)...(30): Xaa is Cys residue protected with ACM protecting group
CAPLRKXRPGFGVARPCAFTPYAPEPGSTXRLC

SEQ ID NO: 1004 - protein, 27 aa, Artificial Sequence
  peptide sequence within human TNFR2 that represents epitope that TNFR2 agonist antibodies or fragments thereof can bind to
  VARIANT (19)...(19): Xaa is Cys residue protected with ACM protecting group
  VARIANT (22)...(22): Xaa is Cys residue protected with ACM protecting group
TPYAPEPGSTCGGSGGMCXSKXSPGQH

SEQ ID NO: 1005 - protein, 27 aa, Artificial Sequence
  peptide sequence within human TNFR2 that represents epitope that TNFR2 agonist antibodies or fragments thereof can bind to
  VARIANT (7)...(7): Xaa is Cys residue protected with ACM protecting group
  VARIANT (25)...(25): Xaa is Cys residue protected with ACM protecting group
  VARIANT (27)...(27): Xaa is Cys residue protected with ACM protecting group
LSCGSRXSSDQGGSGGCTREQNRIXTX

SEQ ID NO: 1006 - protein, 15 aa, Artificial Sequence
  peptide sequence within human TNFR2 that represents epitope that TNFR2 agonist antibodies or fragments thereof can bind to
TAPSTSFLLPMGPSP

SEQ ID NO: 1007 - protein, 27 aa, Artificial Sequence
  peptide sequence within human TNFR2 that represents epitope that TNFR2 agonist antibodies or fragments thereof can bind to
  VARIANT (2)...(2): Xaa is Cys residue protected with ACM protecting group
  VARIANT (9)...(9): Xaa is Cys residue protected with ACM protecting group
  VARIANT (26)...(26): Xaa is Cys residue protected with ACM protecting group
EXLSCGSRXSSGGSGGACTREQNRIXT

SEQ ID NO: 1008 - protein, 27 aa, Artificial Sequence
  peptide sequence within human TNFR2 that represents epitope that TNFR2 agonist antibodies or fragments thereof can bind to
  VARIANT (11)...(11): Xaa is Cys residue protected with ACM protecting group
  VARIANT (26)...(26): Xaa is Cys residue protected with ACM protecting group
CSSDQVETQAXGGSGGTREQNRICTXR

SEQ ID NO: 1009 - protein, 27 aa, Artificial Sequence
  peptide sequence within human TNFR2 that represents epitope that TNFR2 agonist antibodies or fragments thereof can bind to
  VARIANT (3)...(3): Xaa is Cys residue protected with ACM protecting group
  VARIANT (6)...(6): Xaa is Cys residue protected with ACM protecting group
  VARIANT (19)...(19): Xaa is Cys residue protected with ACM protecting group
PEXLSXGSRCSGGSGGQAXTREQNRIC

SEQ ID NO: 1010 - protein, 27 aa, Artificial Sequence
  peptide sequence within human TNFR2 that represents epitope that TNFR2 agonist antibodies or fragments thereof can bind to
  VARIANT (1)...(1): Xaa is Cys residue protected with ACM protecting group
  VARIANT (23)...(23): Xaa is Cys residue protected with ACM protecting group
XGSRCSSDQVEGGSGGQNRICTXRPGW

SEQ ID NO: 1011 - protein, 27 aa, Artificial Sequence
  peptide sequence within human TNFR2 that represents epitope that TNFR2 agonist antibodies or fragments thereof can bind to
  VARIANT (9)...(9): Xaa is Cys residue protected with ACM protecting group
  VARIANT (18)...(18): Xaa is Cys residue protected with ACM protecting group
SKQEGCRLXAPGGSGGLXAPLRKCRPG

SEQ ID NO: 1012 - protein, 27 aa, Artificial Sequence
  peptide sequence within human TNFR2 that represents epitope that TNFR2 agonist antibodies or fragments thereof can bind to
CAPGTFSNTTSGGSGGTTSSTDICRPH

SEQ ID NO: 1013 - protein, 27 aa, Artificial Sequence
  peptide sequence within human TNFR2 that represents epitope that TNFR2 agonist antibodies or fragments thereof can bind to
  VARIANT (1)...(1): Xaa is Cys residue protected with ACM protecting group
  VARIANT (26)...(26): Xaa is Cys residue protected with ACM protecting group
XGSRCSSDQVEGGSGGTREQNRICTXR

SEQ ID NO: 1014 - protein, 33 aa, Artificial Sequence
  peptide sequence within human TNFR2 that represents epitope that TNFR2 agonist antibodies or fragments thereof can bind to
  VARIANT (7)...(7): Xaa is Cys residue protected with ACM protecting group
  VARIANT (23)...(23): Xaa is Cys residue protected with ACM protecting group
CAPLRKXRPGFGVARPCAPLRKXRPGFGVARPC

SEQ ID NO: 1015 - protein, 27 aa, Artificial Sequence
  peptide sequence within human TNFR2 that represents epitope that TNFR2 agonist antibodies or fragments thereof can bind to
  VARIANT (4)...(4): Xaa is Cys residue protected with ACM protecting group
  VARIANT (7)...(7): Xaa is Cys residue protected with ACM protecting group
  VARIANT (23)...(23): Xaa is Cys residue protected with ACM protecting group
VPEXLSXGSRCGGSGGQNRICTXRPGW

SEQ ID NO: 1016 - protein, 27 aa, Artificial Sequence
  peptide sequence within human TNFR2 that represents epitope that TNFR2 agonist antibodies or fragments thereof can bind to
  VARIANT (2)...(2): Xaa is Cys residue protected with ACM protecting group
VXKPCAPGTFSGGSGGTTSSTDICRPH

SEQ ID NO: 1017 - protein, 27 aa, Artificial Sequence
  peptide sequence within human TNFR2 that represents epitope that TNFR2 agonist antibodies or fragments thereof can bind to
  VARIANT (7)...(7): Xaa is Cys residue protected with ACM protecting group
WNWVPEXLSCGGGSGGETQACTREQNR

SEQ ID NO: 1018 - protein, 15 aa, Artificial Sequence
  peptide sequence within human TNFR2 that represents epitope that TNFR2 agonist antibodies or fragments thereof can bind to
DQVETQACTREQNRI

SEQ ID NO: 1019 - protein, 33 aa, Artificial Sequence
  peptide sequence within human TNFR2 that represents epitope that TNFR2 agonist antibodies or fragments thereof can bind to
  VARIANT (7)...(7): Xaa is Cys residue protected with ACM protecting group
  VARIANT (20)...(20): Xaa is Cys residue protected with ACM protecting group
  VARIANT (28)...(28): Xaa is Cys residue protected with ACM protecting group
  VARIANT (30)...(30): Xaa is Cys residue protected with ACM protecting group
CAPLRKXRPGFGVARPCQAXTREQNRIXTXRPC

SEQ ID NO: 1020 - protein, 15 aa, Artificial Sequence
  peptide sequence within human TNFR2 that represents epitope that TNFR2 agonist antibodies or fragments thereof can bind to
NWVPECLSCGSRCSS

SEQ ID NO: 1021 - protein, 27 aa, Artificial Sequence
  peptide sequence within human TNFR2 that represents epitope that TNFR2 agonist antibodies or fragments thereof can bind to
  VARIANT (3)...(3): Xaa is Cys residue protected with ACM protecting group
  VARIANT (26)...(26): Xaa is Cys residue protected with ACM protecting group
LSXGSRCSSDQGGSGGTREQNRICTXR

SEQ ID NO: 1022 - protein, 33 aa, Artificial Sequence; identical to SEQ ID NO: 990
  peptide sequence within human TNFR2 that represents epitope that TNFR2 agonist antibodies or fragments thereof can bind to
  VARIANT (3)...(3): Xaa is Cys residue protected with ACM protecting group
  VARIANT (6)...(6): Xaa is Cys residue protected with ACM protecting group
  VARIANT (12)...(12): Xaa is Cys residue protected with ACM protecting group
  VARIANT (20)...(20): Xaa is Cys residue protected with ACM protecting group
  VARIANT (28)...(28): Xaa is Cys residue protected with ACM protecting group
  VARIANT (30)...(30): Xaa is Cys residue protected with ACM protecting group

SEQ ID NO: 1023 - protein, 15 aa, Artificial Sequence
  peptide sequence within human TNFR2 that represents epitope that TNFR2 agonist antibodies or fragments thereof can bind to
SNTTSSTDICRPHQI

SEQ ID NO: 1024 - protein, 15 aa, Artificial Sequence
  peptide sequence within human TNFR2 that represents epitope that TNFR2 agonist antibodies or fragments thereof can bind to
EGCRLCAPLRAARPG

SEQ ID NO: 1025 - protein, 33 aa, Artificial Sequence
  peptide sequence within human TNFR2 that represents epitope that TNFR2 agonist antibodies or fragments thereof can bind to
  VARIANT (9)...(9): Xaa is Cys residue protected with ACM protecting group
  VARIANT (25)...(25): Xaa is Cys residue protected with ACM protecting group
CAPEPGSTXRLREYYDCNASMDAVXTSTSPTRC

SEQ ID NO: 1026 - protein, 27 aa, Artificial Sequence
  peptide sequence within human TNFR2 that represents epitope that TNFR2 agonist antibodies or fragments thereof can bind to
  VARIANT (7)...(7): Xaa is Cys residue protected with ACM protecting group
  VARIANT (26)...(26): Xaa is Cys residue protected with ACM protecting group
REQNRIXTCRPGGSGGYCALSKQEGXR

SEQ ID NO: 1027 - protein, 33 aa, Artificial Sequence
  peptide sequence within human TNFR2 that represents epitope that TNFR2 agonist antibodies or fragments thereof can bind to
  VARIANT (4)...(4): Xaa is Cys residue protected with ACM protecting group
  VARIANT (14)...(14): Xaa is Cys residue protected with ACM protecting group
  VARIANT (23)...(23): Xaa is Cys residue protected with ACM protecting group
CSRXSSDQVETQAXTRCAPLRKXRPGFGVARPC

SEQ ID NO: 1028 - protein, 27 aa, Artificial Sequence
  peptide sequence within human TNFR2 that represents epitope that TNFR2 agonist antibodies or fragments thereof can bind to
  VARIANT (3)...(3): Xaa is Cys residue protected with ACM protecting group
VVXKPCAPGTFGGSGGTSSTDICRPHQ

SEQ ID NO: 1029 - protein, 22 aa, Artificial Sequence
  peptide sequence within human TNFR2 that represents epitope that TNFR2 agonist antibodies or fragments thereof can bind to
  VARIANT (1)...(1): Xaa is Cys residue protected with ACM protecting group
XKPCAPGTFSNTTSSTDICRPH

SEQ ID NO: 1030 - protein, 27 aa, Artificial Sequence
  peptide sequence within human TNFR2 that represents epitope that TNFR2 agonist antibodies or fragments thereof can bind to
  VARIANT (8)...(8): Xaa is Cys residue protected with ACM protecting group
TETSDVVXKPCGGSGGTTSSTDICRPH

SEQ ID NO: 1031 - protein, 27 aa, Artificial Sequence
  peptide sequence within human TNFR2 that represents epitope that TNFR2 agonist antibodies or fragments thereof can bind to
  VARIANT (19)...(19): Xaa is Cys residue protected with ACM protecting group
RCSSDQVETQAGGSGGQAXTREQNRIC

SEQ ID NO: 1032 - protein, 27 aa, Artificial Sequence
  peptide sequence within human TNFR2 that represents epitope that TNFR2 agonist antibodies or fragments thereof can bind to
  VARIANT (11)...(11): Xaa is Cys residue protected with ACM protecting group
  VARIANT (19)...(19): Xaa is Cys residue protected with ACM protecting group
CSSDQVETQAXGGSGGQAXTREQNRIC

SEQ ID NO: 1033 - protein, 27 aa, Artificial Sequence
  peptide sequence within human TNFR2 that represents epitope that TNFR2 agonist antibodies or fragments thereof can bind to
  VARIANT (4)...(4): Xaa is Cys residue protected with ACM protecting group
  VARIANT (7)...(7): Xaa is Cys residue protected with ACM protecting group
  VARIANT (17)...(17): Xaa is Cys residue protected with ACM protecting group
  VARIANT (27)...(27): Xaa is Cys residue protected with ACM protecting group
VPEXLSXGSRCGGSGGXTREQNRICTX

SEQ ID NO: 1034 - protein, 27 aa, Artificial Sequence
  peptide sequence within human TNFR2 that represents epitope that TNFR2 agonist antibodies or fragments thereof can bind to
  VARIANT (8)...(8): Xaa is Cys residue protected with ACM protecting group
  VARIANT (25)...(25): Xaa is Cys residue protected with ACM protecting group
TREQNRIXTCRGGSGGCALSKQEGXRL

SEQ ID NO: 1035 - protein, 27 aa, Artificial Sequence
  peptide sequence within human TNFR2 that represents epitope that TNFR2 agonist antibodies or fragments thereof can bind to
  VARIANT (8)...(8): Xaa is Cys residue protected with ACM protecting group
  VARIANT (26)...(26): Xaa is Cys residue protected with ACM protecting group
TREQNRIXTCRGGSGGYCALSKQEGXR

SEQ ID NO: 1036 - protein, 15 aa, Artificial Sequence
  peptide sequence within human TNFR2 that represents epitope that TNFR2 agonist antibodies or fragments thereof can bind to
VCTSTSPTRSAGPGA

SEQ ID NO: 1037 - protein, 33 aa, Artificial Sequence
  peptide sequence within human TNFR2 that represents epitope that TNFR2 agonist antibodies or fragments thereof can bind to
  VARIANT (4)...(4): Xaa is Cys residue protected with ACM protecting group
  VARIANT (12)...(12): Xaa is Cys residue protected with ACM protecting group
  VARIANT (14)...(14): Xaa is Cys residue protected with ACM protecting group
  VARIANT (23)...(23): Xaa is Cys residue protected with ACM protecting group
CQAXTREQNRIXTXRPCAPLRKXRPGFGVARPC

SEQ ID NO: 1038 - protein, 27 aa, Artificial Sequence
  peptide sequence within human TNFR2 that represents epitope that TNFR2 agonist antibodies or fragments thereof can bind to
  VARIANT (5)...(5): Xaa is Cys residue protected with ACM protecting group
SDVVXKPCAPGGGSGGTTSSTDICRPH

SEQ ID NO: 1039 - protein, 17 aa, Artificial Sequence
  peptide sequence within human TNFR2 that represents epitope that TNFR2 agonist antibodies or fragments thereof can bind to
CAATREQNRIAAGRPGC

SEQ ID NO: 1040 - protein, 33 aa, Artificial Sequence
  peptide sequence within human TNFR2 that represents epitope that TNFR2 agonist antibodies or fragments thereof can bind to
  VARIANT (9)...(9): Xaa is Cys residue protected with ACM protecting group
  VARIANT (23)...(23): Xaa can be any naturally occurring amino acid
CDQVETQAXTREQNRICAPLRKXRPGFGVARPC

SEQ ID NO: 1041 - protein, 27 aa, Artificial Sequence
  peptide sequence within human TNFR2 that represents epitope that TNFR2 agonist antibodies or fragments thereof can bind to
  VARIANT (26)...(26): Xaa is Cys residue protected with ACM protecting group
SRCSSDQVETQGGSGGTREQNRICTXR

SEQ ID NO: 1042 - protein, 15 aa, Artificial Sequence
  peptide sequence within human TNFR2 that represents epitope that TNFR2 agonist antibodies or fragments thereof can bind to
STAPSTSFLLPMGPS

SEQ ID NO: 1043 - protein, 27 aa, Artificial Sequence
  peptide sequence within human TNFR2 that represents epitope that TNFR2 agonist antibodies or fragments thereof can bind to
  VARIANT (3)...(3): Xaa is Cys residue protected with ACM protecting group
  VARIANT (18)...(18): Xaa is Cys residue protected with ACM protecting group
LSXGSRCSSDQGGSGGAXTREQNRICT

SEQ ID NO: 1044 - protein, 33 aa, Artificial Sequence
  peptide sequence within human TNFR2 that represents epitope that TNFR2 agonist antibodies or fragments thereof can bind to
  VARIANT (8)...(8): Xaa is Cys residue protected with ACM protecting group
  VARIANT (11)...(11): Xaa is Cys residue protected with ACM protecting group
  VARIANT (30)...(30): Xaa is Cys residue protected with ACM protecting group
CLSKQEGXRLXAPLRKCAFTPYAPEPGSTXRLC

SEQ ID NO: 1045 - protein, 24 aa, Artificial Sequence
  peptide sequence within human TNFR2 that represents epitope that TNFR2 agonist antibodies or fragments thereof can bind to
CNWVPEALSAGPGASSDQVETQAC

SEQ ID NO: 1046 - protein, 27 aa, Artificial Sequence
  peptide sequence within human TNFR2 that represents epitope that TNFR2 agonist antibodies or fragments thereof can bind to
  VARIANT (7)...(7): Xaa is Cys residue protected with ACM protecting group
ETSDVVXKPCAGGSGGTTSSTDICRPH

SEQ ID NO: 1047 - protein, 27 aa, Artificial Sequence
  peptide sequence within human TNFR2 that represents epitope that TNFR2 agonist antibodies or fragments thereof can bind to
  VARIANT (2)...(2): Xaa is Cys residue protected with ACM protecting group
VXKPCAPGTFSGGSGGTSSTDICRPHQ

SEQ ID NO: 1048 - protein, 33 aa, Artificial Sequence
  peptide sequence within human TNFR2 that represents epitope that TNFR2 agonist antibodies or fragments thereof can bind to
  VARIANT (14)...(14): Xaa is Cys residue protected with ACM protecting group
  VARIANT (23)...(23): Xaa is Cys residue protected with ACM protecting group
CVAIPGNASMDAVXTSCAPLRKXRPGFGVARPC

SEQ ID NO: 1049 - protein, 27 aa, Artificial Sequence
  peptide sequence within human TNFR2 that represents epitope that TNFR2 agonist antibodies or fragments thereof can bind to
  VARIANT (5)...(5): Xaa is Cys residue protected with ACM protecting group
SDVVXKPCAPGGGSGGTSSTDICRPHQ

SEQ ID NO: 1050 - protein, 27 aa, Artificial Sequence
  peptide sequence within human TNFR2 that represents epitope that TNFR2 agonist antibodies or fragments thereof can bind to
QICNVVAIPGNGGSGGCTSTSPTRSMA

SEQ ID NO: 1051 - protein, 15 aa, Artificial Sequence
  peptide sequence within human TNFR2 that represents epitope that TNFR2 agonist antibodies or fragments thereof can bind to
DICRPHQICNVVAIP

SEQ ID NO: 1052 - protein, 17 aa, Artificial Sequence
  peptide sequence within human TNFR2 that represents epitope that TNFR2 agonist antibodies or fragments thereof can bind to
CLWNWVPEALSAGSRAC

SEQ ID NO: 1053 - protein, 33 aa, Artificial Sequence
  peptide sequence within human TNFR2 that represents epitope that TNFR2 agonist antibodies or fragments thereof can bind to
  VARIANT (9)...(9): Xaa is Cys residue protected with ACM protecting group
  VARIANT (23)...(23): Xaa is Cys residue protected with ACM protecting group
CAPEPGSTXRLREYYDCAPLRKXRPGFGVARPC

SEQ ID NO: 1054 - protein, 27 aa, Artificial Sequence
  peptide sequence within human TNFR2 that represents epitope that TNFR2 agonist antibodies or fragments thereof can bind to
  VARIANT (19)...(19): Xaa is Cys residue protected with ACM protecting group
  VARIANT (22)...(22): Xaa is Cys residue protected with ACM protecting group
STCRLREYYDQGGSGGMCXSKXSPGQH

SEQ ID NO: 1055 - protein, 27 aa, Artificial Sequence
  peptide sequence within human TNFR2 that represents epitope that TNFR2 agonist antibodies or fragments thereof can bind to
  VARIANT (4)...(4): Xaa is Cys residue protected with ACM protecting group
  VARIANT (11)...(11): Xaa is Cys residue protected with ACM protecting group
VPEXLSCGSRXGGSGGTQACTREQNRI

SEQ ID NO: 1056 - protein, 27 aa, Artificial Sequence
  peptide sequence within human TNFR2 that represents epitope that TNFR2 agonist antibodies or fragments thereof can bind to
  VARIANT (7)...(7): Xaa is Cys residue protected with ACM protecting group
  VARIANT (26)...(26): Xaa is Cys residue protected with ACM protecting group
LSCGSRXSSDQGGSGGACTREQNRIXT

SEQ ID NO: 1057 - protein, 33 aa, Artificial Sequence
  peptide sequence within human TNFR2 that represents epitope that TNFR2 agonist antibodies or fragments thereof can bind to
  VARIANT (2)...(2): Xaa is Cys residue protected with ACM protecting group
  VARIANT (20)...(20): Xaa is Cys residue protected with ACM protecting group
CXEDSTYTQLWNWVPECQIXNVVAIPGNASMDC

SEQ ID NO: 1058 - protein, 27 aa, Artificial Sequence
  peptide sequence within human TNFR2 that represents epitope that TNFR2 agonist antibodies or fragments thereof can bind to
  VARIANT (6)...(6): Xaa is Cys residue protected with ACM protecting group
  VARIANT (27)...(27): Xaa is Cys residue protected with ACM protecting group
SCGSRXSSDQVGGSGGQACTREQNRIX

SEQ ID NO: 1059 - protein, 27 aa, Artificial Sequence
  peptide sequence within human TNFR2 that represents epitope that TNFR2 agonist antibodies or fragments thereof can bind to
  VARIANT (19)...(19): Xaa is Cys residue protected with ACM protecting group
SRCSSDQVETQGGSGGQAXTREQNRIC

SEQ ID NO: 1060 - protein, 33 aa, Artificial Sequence
  peptide sequence within human TNFR2 that represents epitope that TNFR2 agonist antibodies or fragments thereof can bind to
  VARIANT (23)...(23): Xaa is Cys residue protected with ACM protecting group
CTSPTRSMAPGAVHLPCAPLRKXRPGFGVARPC

SEQ ID NO: 1061 - protein, 27 aa, Artificial Sequence
  peptide sequence within human TNFR2 that represents epitope that TNFR2 agonist antibodies or fragments thereof can bind to
  VARIANT (2)...(2): Xaa is Cys residue protected with ACM protecting group
  VARIANT (19)...(19): Xaa is Cys residue protected with ACM protecting group
SXGSRCSSDQVGGSGGQAXTREQNRIC

SEQ ID NO: 1062 - protein, 27 aa, Artificial Sequence
  peptide sequence within human TNFR2 that represents epitope that TNFR2 agonist antibodies or fragments thereof can bind to
  VARIANT (8)...(8): Xaa is Cys residue protected with ACM protecting group
  VARIANT (18)...(18): Xaa is Cys residue protected with ACM protecting group
KQEGCRLXAPLGGSGGLXAPLRKCRPG

SEQ ID NO: 1063 - protein, 17 aa, Artificial Sequence
  peptide sequence within human TNFR2 that represents epitope that TNFR2 agonist antibodies or fragments thereof can bind to
CAATREQNRIATARPGC

SEQ ID NO: 1064 - protein, 33 aa, Artificial Sequence
  peptide sequence within human TNFR2 that represents epitope that TNFR2 agonist antibodies or fragments thereof can bind to
  VARIANT (2)...(2): Xaa is Cys residue protected with ACM protecting group
  VARIANT (3)...(3): Xaa is Cys residue protected with ACM protecting group
  VARIANT (6)...(6): Xaa is Cys residue protected with ACM protecting group
  VARIANT (16)...(16): Xaa is Cys residue protected with ACM protecting group
  VARIANT (23)...(23): Xaa is Cys residue protected with ACM protecting group
CXXSKXSPGQHAKVFXCAPLRKXRPGFGVARPC

SEQ ID NO: 1065 - protein, 33 aa, Artificial Sequence
  peptide sequence within human TNFR2 that represents epitope that TNFR2 agonist antibodies or fragments thereof can bind to
  VARIANT (5)...(5): Xaa is Cys residue protected with ACM protecting group
  VARIANT (8)...(8): Xaa is Cys residue protected with ACM protecting group
  VARIANT (25)...(25): Xaa is Cys residue protected with ACM protecting group
CDVVXKPXAPGTFSNTCNASMDAVXTSTSPTRC

SEQ ID NO: 1066 - protein, 27 aa, Artificial Sequence
  peptide sequence within human TNFR2 that represents epitope that TNFR2 agonist antibodies or fragments thereof can bind to
  VARIANT (1)...(1): Xaa is Cys residue protected with ACM protecting group
  VARIANT (4)...(4): Xaa is Cys residue protected with ACM protecting group
  VARIANT (18)...(18): Xaa is Cys residue protected with ACM protecting group
XLSXGSRCSSDGGSGGAXTREQNRICT

SEQ ID NO: 1067 - protein, 27 aa, Artificial Sequence
  peptide sequence within human TNFR2 that represents epitope that TNFR2 agonist antibodies or fragments thereof can bind to
  VARIANT (2)...(2): Xaa is Cys residue protected with ACM protecting group
  VARIANT (9)...(9): Xaa is Cys residue protected with ACM protecting group
EXLSCGSRXSSGGSGGTQACTREQNRI

SEQ ID NO: 1068 - protein, 33 aa, Artificial Sequence
  peptide sequence within human TNFR2 that represents epitope that TNFR2 agonist antibodies or fragments thereof can bind to
  VARIANT (12)...(12): Xaa is Cys residue protected with ACM protecting group
  VARIANT (15)...(15): Xaa is Cys residue protected with ACM protecting group
  VARIANT (25)...(25): Xaa is Cys residue protected with ACM protecting group
CYTQLWNWVPEXLSXGCNASMDAVXTSTSPTRC

SEQ ID NO: 1069 - protein, 27 aa, Artificial Sequence
  peptide sequence within human TNFR2 that represents epitope that TNFR2 agonist antibodies or fragments thereof can bind to
  VARIANT (3)...(3): Xaa is Cys residue protected with ACM protecting group
  VARIANT (17)...(17): Xaa is Cys residue protected with ACM protecting group
  VARIANT (27)...(27): Xaa is Cys residue protected with ACM protecting group
LSXGSRCSSDQGGSGGXTREQNRICTX

SEQ ID NO: 1070 - protein, 33 aa, Artificial Sequence
  peptide sequence within human TNFR2 that represents epitope that TNFR2 agonist antibodies or fragments thereof can bind to
  VARIANT (2)...(2): Xaa is Cys residue protected with ACM protecting group
  VARIANT (5)...(5): Xaa is Cys residue protected with ACM protecting group
  VARIANT (9)...(9): Xaa is Cys residue protected with ACM protecting group
  VARIANT (23)...(23): Xaa is Cys residue protected with ACM protecting group
CXLSXGSRXSSDQVETCAPLRKXRPGFGVARPC

SEQ ID NO: 1071 - protein, 27 aa, Artificial Sequence
  peptide sequence within human TNFR2 that represents epitope that TNFR2 agonist antibodies or fragments thereof can bind to
  VARIANT (5)...(5): Xaa is Cys residue protected with ACM protecting group
WVPEXLSCGSRGGSGGTQACTREQNRI

SEQ ID NO: 1072 - protein, 27 aa, Artificial Sequence
  peptide sequence within human TNFR2 that represents epitope that TNFR2 agonist antibodies or fragments thereof can bind to
  VARIANT (1)...(1): Xaa is Cys residue protected with ACM protecting group
  VARIANT (9)...(9): Xaa is Cys residue protected with ACM protecting group
  VARIANT (25)...(25): Xaa is Cys residue protected with ACM protecting group
XTREQNRIXTCGGSGGCALSKQEGXRL

SEQ ID NO: 1073 - protein, 15 aa, Artificial Sequence
  peptide sequence within human TNFR2 that represents epitope that TNFR2 agonist antibodies or fragments thereof can bind to
SDQVETQACTREQNR

SEQ ID NO: 1074 - protein, 27 aa, Artificial Sequence
  peptide sequence within human TNFR2 that represents epitope that TNFR2 agonist antibodies or fragments thereof can bind to
  VARIANT (1)...(1): Xaa is Cys residue protected with ACM protecting group
  VARIANT (19)...(19): Xaa is Cys residue protected with ACM protecting group
XGSRCSSDQVEGGSGGQAXTREQNRIC

SEQ ID NO: 1075 - protein, 27 aa, Artificial Sequence
  peptide sequence within human TNFR2 that represents epitope that TNFR2 agonist antibodies or fragments thereof can bind to
  VARIANT (4)...(4): Xaa is Cys residue protected with ACM protecting group
  VARIANT (25)...(25): Xaa is Cys residue protected with ACM protecting group
NRIXTCRPGWYGGSGGCALSKQEGXRL

SEQ ID NO: 1076 - protein, 33 aa, Artificial Sequence
  peptide sequence within human TNFR2 that represents epitope that TNFR2 agonist antibodies or fragments thereof can bind to
  VARIANT (3)...(3): Xaa is Cys residue protected with ACM protecting group
  VARIANT (6)...(6): Xaa is Cys residue protected with ACM protecting group
  VARIANT (12)...(12): Xaa is Cys residue protected with ACM protecting group
  VARIANT (28)...(28): Xaa is Cys residue protected with ACM protecting group
  VARIANT (29)...(29): Xaa is Cys residue protected with ACM protecting group
  VARIANT (32)...(32): Xaa is Cys residue protected with ACM protecting group
CGXRLXAPLRKXRPGFCREYYDQTAQMXXSKXC

SEQ ID NO: 1077 - protein, 15 aa, Artificial Sequence
  peptide sequence within human TNFR2 that represents epitope that TNFR2 agonist antibodies or fragments thereof can bind to
GTFSNTTSSTAACRP

SEQ ID NO: 1078 - protein, 33 aa, Artificial Sequence
  peptide sequence within human TNFR2 that represents epitope that TNFR2 agonist antibodies or fragments thereof can bind to
  VARIANT (4)...(4): Xaa is Cys residue protected with ACM protecting group
  VARIANT (7)...(7): Xaa is Cys residue protected with ACM protecting group
  VARIANT (25)...(25): Xaa is Cys residue protected with ACM protecting group
CTVXDSXEDSTYTQLWCNASMDAVXTSTSPTRC

SEQ ID NO: 1079 - protein, 27 aa, Artificial Sequence
  peptide sequence within human TNFR2 that represents epitope that TNFR2 agonist antibodies or fragments thereof can bind to
  VARIANT (20)...(20): Xaa is Cys residue protected with ACM protecting group
  VARIANT (23)...(23): Xaa is Cys residue protected with ACM protecting group
PGSTCRLREYYGGSGGQMCXSKXSPGQ

SEQ ID NO: 1080 - protein, 27 aa, Artificial Sequence
  peptide sequence within human TNFR2 that represents epitope that TNFR2 agonist antibodies or fragments thereof can bind to
  VARIANT (5)...(5): Xaa is Cys residue protected with ACM protecting group
WVPEXLSCGSRGGSGGETQACTREQNR

SEQ ID NO: 1081 - protein, 27 aa, Artificial Sequence
  peptide sequence within human TNFR2 that represents epitope that TNFR2 agonist antibodies or fragments thereof can bind to
  VARIANT (7)...(7): Xaa is Cys residue protected with ACM protecting group
LSCGSRXSSDQGGSGGTQACTREQNRI

SEQ ID NO: 1082 - protein, 27 aa, Artificial Sequence
  peptide sequence within human TNFR2 that represents epitope that TNFR2 agonist antibodies or fragments thereof can bind to
  VARIANT (2)...(2): Xaa is Cys residue protected with ACM protecting group
  VARIANT (5)...(5): Xaa is Cys residue protected with ACM protecting group
  VARIANT (17)...(17): Xaa is Cys residue protected with ACM protecting group
  VARIANT (27)...(27): Xaa is Cys residue protected with ACM protecting group
EXLSXGSRCSSGGSGGXTREQNRICTX

SEQ ID NO: 1083 - protein, 27 aa, Artificial Sequence
  peptide sequence within human TNFR2 that represents epitope that TNFR2 agonist antibodies or fragments thereof can bind to
  VARIANT (1)...(1): Xaa is Cys residue protected with ACM protecting group
  VARIANT (4)...(4): Xaa is Cys residue protected with ACM protecting group
  VARIANT (26)...(26): Xaa is Cys residue protected with ACM protecting group
XLSXGSRCSSDGGSGGTREQNRICTXR

SEQ ID NO: 1084 - protein, 15 aa, Artificial Sequence
  peptide sequence within human TNFR2 that represents epitope that TNFR2 agonist antibodies or fragments thereof can bind to
PYAPEPGSTCRLREY

SEQ ID NO: 1085 - protein, 33 aa, Artificial Sequence
  peptide sequence within human TNFR2 that represents epitope that TNFR2 agonist antibodies or fragments thereof can bind to
  VARIANT (2)...(2): Xaa is Cys residue protected with ACM protecting group
  VARIANT (3)...(3): Xaa is Cys residue protected with ACM protecting group
  VARIANT (6)...(6): Xaa is Cys residue protected with ACM protecting group
  VARIANT (16)...(16): Xaa is Cys residue protected with ACM protecting group
  VARIANT (25)...(25): Xaa is Cys residue protected with ACM protecting group
CXXSKXSPGQHAKVFXCNASMDAVXTSTSPTRC

SEQ ID NO: 1086 - protein, 33 aa, Artificial Sequence
  peptide sequence within human TNFR2 that represents epitope that TNFR2 agonist antibodies or fragments thereof can bind to
  VARIANT (8)...(8): Xaa is Cys residue protected with ACM protecting group
  VARIANT (14)...(14): Xaa is Cys residue protected with ACM protecting group
  VARIANT (25)...(25): Xaa is Cys residue protected with ACM protecting group
CTSSTDIXRPHQIXNVCNASMDAVXTSTSPTRC

SEQ ID NO: 1087 - protein, 33 aa, Artificial Sequence
  peptide sequence within human TNFR2 that represents epitope that TNFR2 agonist antibodies or fragments thereof can bind to
  VARIANT (2)...(2): Xaa is Cys residue protected with ACM protecting group
  VARIANT (3)...(3): Xaa is Cys residue protected with ACM protecting group
  VARIANT (6)...(6): Xaa is Cys residue protected with ACM protecting group
  VARIANT (16)...(16): Xaa is Cys residue protected with ACM protecting group
  VARIANT (20)...(20): Xaa is Cys residue protected with ACM protecting group
CXXSKXSPGQHAKVFXCAVXTSTSPTRSMAPGC

SEQ ID NO: 1088 - protein, 27 aa, Artificial Sequence
  peptide sequence within human TNFR2 that represents epitope that TNFR2 agonist antibodies or fragments thereof can bind to
  VARIANT (3)...(3): Xaa is Cys residue protected with ACM protecting group
  VARIANT (10)...(10): Xaa is Cys residue protected with ACM protecting group
PEXLSCGSRXSGGSGGTQACTREQNRI

SEQ ID NO: 1089 - protein, 27 aa, Artificial Sequence
  peptide sequence within human TNFR2 that represents epitope that TNFR2 agonist antibodies or fragments thereof can bind to
  VARIANT (26)...(26): Xaa is Cys residue protected with ACM protecting group
GSRCSSDQVETGGSGGTREQNRICTXR

SEQ ID NO: 1090 - protein, 27 aa, Artificial Sequence
  peptide sequence within human TNFR2 that represents epitope that TNFR2 agonist antibodies or fragments thereof can bind to
  VARIANT (5)...(5): Xaa is Cys residue protected with ACM protecting group
  VARIANT (20)...(20): Xaa is Cys residue protected with ACM protecting group
KQEGXRLCAPLGGSGGCKPXAPGTFSN

SEQ ID NO: 1091 - protein, 27 aa, Artificial Sequence
  peptide sequence within human TNFR2 that represents epitope that TNFR2 agonist antibodies or fragments thereof can bind to
PHQICNVVAIPGGSGGCTSTSPTRSMA

SEQ ID NO: 1092 - protein, 33 aa, Artificial Sequence
  peptide sequence within human TNFR2 that represents epitope that TNFR2 agonist antibodies or fragments thereof can bind to
  VARIANT (23)...(23): Xaa is Cys residue protected with ACM protecting group
CLPMGPSPPAEGSTGDCAPLRKXRPGFGVARPC

SEQ ID NO: 1093 - protein, 27 aa, Artificial Sequence
  peptide sequence within human TNFR2 that represents epitope that TNFR2 agonist antibodies or fragments thereof can bind to
  VARIANT (1)...(1): Xaa is Cys residue protected with ACM protecting group
  VARIANT (8)...(8): Xaa is Cys residue protected with ACM protecting group
  VARIANT (25)...(25): Xaa is Cys residue protected with ACM protecting group
  VARIANT (27)...(27): Xaa is Cys residue protected with ACM protecting group
XLSCGSRXSSDGGSGGCTREQNRIXTX

SEQ ID NO: 1094 - protein, 27 aa, Artificial Sequence
  peptide sequence within human TNFR2 that represents epitope that TNFR2 agonist antibodies or fragments thereof can bind to
  VARIANT (1)...(1): Xaa is Cys residue protected with ACM protecting group
XKPCAPGTFSNGGSGGTTSSTDICRPH

SEQ ID NO: 1095 - protein, 33 aa, Artificial Sequence
  peptide sequence within human TNFR2 that represents epitope that TNFR2 agonist antibodies or fragments thereof can bind to
  VARIANT (7)...(7): Xaa is Cys residue protected with ACM protecting group
  VARIANT (8)...(8): Xaa is Cys residue protected with ACM protecting group
  VARIANT (11)...(11): Xaa is Cys residue protected with ACM protecting group
  VARIANT (30)...(30): Xaa is Cys residue protected with ACM protecting group
CQTAQMXXSKXSPGQHCAFTPYAPEPGSTXRLC

SEQ ID NO: 1096 - protein, 15 aa, Artificial Sequence
  peptide sequence within human TNFR2 that represents epitope that TNFR2 agonist antibodies or fragments thereof can bind to
TSSTDICRPHQICNV

SEQ ID NO: 1097 - protein, 17 aa, Artificial Sequence
  peptide sequence within human TNFR2 that represents epitope that TNFR2 agonist antibodies or fragments thereof can bind to
CEGARLAAPLRAGRPGC

SEQ ID NO: 1098 - protein, 33 aa, Artificial Sequence
  peptide sequence within human TNFR2 that represents epitope that TNFR2 agonist antibodies or fragments thereof can bind to
  VARIANT (4)...(4): Xaa is Cys residue protected with ACM protecting group
  VARIANT (12)...(12): Xaa is Cys residue protected with ACM protecting group
  VARIANT (14)...(14): Xaa is Cys residue protected with ACM protecting group
  VARIANT (30)...(30): Xaa is Cys residue protected with ACM protecting group
CQAXTREQNRIXTXRPCAFTPYAPEPGSTXRLC

SEQ ID NO: 1099 - protein, 27 aa, Artificial Sequence
  peptide sequence within human TNFR2 that represents epitope that TNFR2 agonist antibodies or fragments thereof can bind to
  VARIANT (2)...(2): Xaa is Cys residue protected with ACM protecting group
  VARIANT (23)...(23): Xaa is Cys residue protected with ACM protecting group
SXGSRCSSDQVGGSGGQNRICTXRPGW

SEQ ID NO: 1100 - protein, 33 aa, Artificial Sequence
  peptide sequence within human TNFR2 that represents epitope that TNFR2 agonist antibodies or fragments thereof can bind to
  VARIANT (9)...(9): Xaa is Cys residue protected with ACM protecting group
  VARIANT (22)...(22): Xaa is Cys residue protected with ACM protecting group
  VARIANT (23)...(23): Xaa can be any naturally occurring amino acid
CDQVETQAXTREQNRICAPLRXXRPGFGVARPC

SEQ ID NO: 1101 - protein, 27 aa, Artificial Sequence
  peptide sequence within human TNFR2 that represents epitope that TNFR2 agonist antibodies or fragments thereof can bind to
  VARIANT (2)...(2): Xaa is Cys residue protected with ACM protecting group
  VARIANT (25)...(25): Xaa is Cys residue protected with ACM protecting group
VXKPCAPGTFSGGSGGDICRPHQIXNV

SEQ ID NO: 1102 - protein, 27 aa, Artificial Sequence
  peptide sequence within human TNFR2 that represents epitope that TNFR2 agonist antibodies or fragments thereof can bind to
  VARIANT (1)...(1): Xaa is Cys residue protected with ACM protecting group
  VARIANT (8)...(8): Xaa is Cys residue protected with ACM protecting group
  VARIANT (26)...(26): Xaa is Cys residue protected with ACM protecting group
XLSCGSRXSSDGGSGGACTREQNRIXT

SEQ ID NO: 1103 - protein, 27 aa, Artificial Sequence
  peptide sequence within human TNFR2 that represents epitope that TNFR2 agonist antibodies or fragments thereof can bind to
  VARIANT (19)...(19): Xaa is Cys residue protected with ACM protecting group
GSRCSSDQVETGGSGGQAXTREQNRIC

SEQ ID NO: 1104 - protein, 33 aa, Artificial Sequence
  peptide sequence within human TNFR2 that represents epitope that TNFR2 agonist antibodies or fragments thereof can bind to
  VARIANT (7)...(7): Xaa is Cys residue protected with ACM protecting group
  VARIANT (8)...(8): Xaa is Cys residue protected with ACM protecting group
  VARIANT (11)...(11): Xaa is Cys residue protected with ACM protecting group
  VARIANT (20)...(20): Xaa is Cys residue protected with ACM protecting group
  VARIANT (28)...(28): Xaa is Cys residue protected with ACM protecting group
  VARIANT (30)...(30): Xaa is Cys residue protected with ACM protecting group
CQTAQMXXSKXSPGQHCQAXTREQNRIXTXRPC

SEQ ID NO: 1105 - protein, 27 aa, Artificial Sequence
  peptide sequence within human TNFR2 that represents epitope that TNFR2 agonist antibodies or fragments thereof can bind to
  VARIANT (2)...(2): Xaa is Cys residue protected with ACM protecting group
YXALSKQEGCRGGSGGKCRPGFGVARP

SEQ ID NO: 1106 - protein, 27 aa, Artificial Sequence
  peptide sequence within human TNFR2 that represents epitope that TNFR2 agonist antibodies or fragments thereof can bind to
  VARIANT (26)...(26): Xaa is Cys residue protected with ACM protecting group
PCAPGTFSNTTGGSGGTDICRPHQIXN

SEQ ID NO: 1107 - protein, 27 aa, Artificial Sequence
  peptide sequence within human TNFR2 that represents epitope that TNFR2 agonist antibodies or fragments thereof can bind to
  VARIANT (3)...(3): Xaa is Cys residue protected with ACM protecting group
DIXRPHQICNVGGSGGVCTSTSPTRSM

SEQ ID NO: 1108 - protein, 17 aa, Artificial Sequence
  peptide sequence within human TNFR2 that represents epitope that TNFR2 agonist antibodies or fragments thereof can bind to
CYTQLWNWVPEGASAGC

SEQ ID NO: 1109 - protein, 27 aa, Artificial Sequence
  peptide sequence within human TNFR2 that represents epitope that TNFR2 agonist antibodies or fragments thereof can bind to
  VARIANT (20)...(20): Xaa is Cys residue protected with ACM protecting group
  VARIANT (23)...(23): Xaa is Cys residue protected with ACM protecting group
GSTCRLREYYDGGSGGQMCXSKXSPGQ

SEQ ID NO: 1110 - protein, 27 aa, Artificial Sequence
  peptide sequence within human TNFR2 that represents epitope that TNFR2 agonist antibodies or fragments thereof can bind to
  VARIANT (7)...(7): Xaa is Cys residue protected with ACM protecting group
QEGCRLXAPLRGGSGGKCRPGFGVARP

SEQ ID NO: 1111 - protein, 33 aa, Artificial Sequence
  peptide sequence within human TNFR2 that represents epitope that TNFR2 agonist antibodies or fragments thereof can bind to
  VARIANT (9)...(9): Xaa is Cys residue protected with ACM protecting group
  VARIANT (23)...(23): Xaa is Cys residue protected with ACM protecting group
CNASMDAVXTSTSPTRCAPLRKXRPGFGVARPC

SEQ ID NO: 1112 - protein, 33 aa, Artificial Sequence
  peptide sequence within human TNFR2 that represents epitope that TNFR2 agonist antibodies or fragments thereof can bind to
  VARIANT (12)...(12): Xaa is Cys residue protected with ACM protecting group
  VARIANT (13)...(13): Xaa is Cys residue protected with ACM protecting group
  VARIANT (16)...(16): Xaa is Cys residue protected with ACM protecting group
  VARIANT (25)...(25): Xaa is Cys residue protected with ACM protecting group
CREYYDQTAQMXXSKXCNASMDAVXTSTSPTRC

SEQ ID NO: 1113 - protein, 27 aa, Artificial Sequence
  peptide sequence within human TNFR2 that represents epitope that TNFR2 agonist antibodies or fragments thereof can bind to
  VARIANT (5)...(5): Xaa is Cys residue protected with ACM protecting group
  VARIANT (27)...(27): Xaa is Cys residue protected with ACM protecting group
CGSRXSSDQVEGGSGGQACTREQNRIX

SEQ ID NO: 1114 - protein, 33 aa, Artificial Sequence
  peptide sequence within human TNFR2 that represents epitope that TNFR2 agonist antibodies or fragments thereof can bind to
  VARIANT (25)...(25): Xaa is Cys residue protected with ACM protecting group
CLPAQVAFTPYAPEPGCNASMDAVXTSTSPTRC

SEQ ID NO: 1115 - protein, 24 aa, Artificial Sequence
  peptide sequence within human TNFR2 that represents epitope that TNFR2 agonist antibodies or fragments thereof can bind to
CLWNWVPEALSPGSRASSDQVETC

SEQ ID NO: 1116 - protein, 27 aa, Artificial Sequence
  peptide sequence within human TNFR2 that represents epitope that TNFR2 agonist antibodies or fragments thereof can bind to
  VARIANT (2)...(2): Xaa is Cys residue protected with ACM protecting group
  VARIANT (18)...(18): Xaa is Cys residue protected with ACM protecting group
SXGSRCSSDQVGGSGGAXTREQNRICT

SEQ ID NO: 1117 - protein, 17 aa, Artificial Sequence
  peptide sequence within human TNFR2 that represents epitope that TNFR2 agonist antibodies or fragments thereof can bind to
CSTAPSTSFLLPMGPSC

SEQ ID NO: 1118 - protein, 33 aa, Artificial Sequence; identical to SEQ ID NO: 1098
  peptide sequence within human TNFR2 that represents epitope that TNFR2 agonist antibodies or fragments thereof can bind to
  VARIANT (4)...(4): Xaa is Cys residue protected with ACM protecting group
  VARIANT (12)...(12): Xaa is Cys residue protected with ACM protecting group
  VARIANT (14)...(14): Xaa is Cys residue protected with ACM protecting group
  VARIANT (30)...(30): Xaa is Cys residue protected with ACM protecting group

SEQ ID NO: 1119 - protein, 33 aa, Artificial Sequence
  peptide sequence within human TNFR2 that represents epitope that TNFR2 agonist antibodies or fragments thereof can bind to
  VARIANT (4)...(4): Xaa is Cys residue protected with ACM protecting group
  VARIANT (23)...(23): Xaa is Cys residue protected with ACM protecting group
CAVXTSTSPTRSMAPGCAPLRKXRPGFGVARPC

SEQ ID NO: 1120 - protein, 22 aa, Artificial Sequence
  peptide sequence within human TNFR2 that represents epitope that TNFR2 agonist antibodies or fragments thereof can bind to
  VARIANT (5)...(5): Xaa is Cys residue protected with ACM protecting group
  VARIANT (21)...(21): Xaa is Cys residue protected with ACM protecting group
QNRIXTCRPGWYCALSKQEGXR

SEQ ID NO: 1121 - protein, 27 aa, Artificial Sequence
  peptide sequence within human TNFR2 that represents epitope that TNFR2 agonist antibodies or fragments thereof can bind to
  VARIANT (4)...(4): Xaa is Cys residue protected with ACM protecting group
  VARIANT (7)...(7): Xaa is Cys residue protected with ACM protecting group
  VARIANT (26)...(26): Xaa is Cys residue protected with ACM protecting group
VPEXLSXGSRCGGSGGTREQNRICTXR

SEQ ID NO: 1122 - protein, 27 aa, Artificial Sequence
  peptide sequence within human TNFR2 that represents epitope that TNFR2 agonist antibodies or fragments thereof can bind to
  VARIANT (1)...(1): Xaa is Cys residue protected with ACM protecting group
XKPCAPGTFSNGGSGGTSSTDICRPHQ

SEQ ID NO: 1123 - protein, 27 aa, Artificial Sequence
  peptide sequence within human TNFR2 that represents epitope that TNFR2 agonist antibodies or fragments thereof can bind to
  VARIANT (6)...(6): Xaa is Cys residue protected with ACM protecting group
  VARIANT (25)...(25): Xaa is Cys residue protected with ACM protecting group
  VARIANT (27)...(27): Xaa is Cys residue protected with ACM protecting group
NWVPEXLSCGSGGSGGCTREQNRIXTX

SEQ ID NO: 1124 - protein, 33 aa, Artificial Sequence
  peptide sequence within human TNFR2 that represents epitope that TNFR2 agonist antibodies or fragments thereof can bind to
  VARIANT (12)...(12): Xaa is Cys residue protected with ACM protecting group
  VARIANT (13)...(13): Xaa is Cys residue protected with ACM protecting group
  VARIANT (16)...(16): Xaa is Cys residue protected with ACM protecting group
  VARIANT (23)...(23): Xaa is Cys residue protected with ACM protecting group
CREYYDQTAQMXXSKXCAPLRKXRPGFGVARPC

SEQ ID NO: 1125 - protein, 27 aa, Artificial Sequence
  peptide sequence within human TNFR2 that represents epitope that TNFR2 agonist antibodies or fragments thereof can bind to
  VARIANT (1)...(1): Xaa is Cys residue protected with ACM protecting group
  VARIANT (4)...(4): Xaa is Cys residue protected with ACM protecting group
  VARIANT (17)...(17): Xaa is Cys residue protected with ACM protecting group
  VARIANT (27)...(27): Xaa is Cys residue protected with ACM protecting group
XLSXGSRCSSDGGSGGXTREQNRICTX

SEQ ID NO: 1126 - protein, 27 aa, Artificial Sequence
  peptide sequence within human TNFR2 that represents epitope that TNFR2 agonist antibodies or fragments thereof can bind to
  VARIANT (4)...(4): Xaa is Cys residue protected with ACM protecting group
  VARIANT (20)...(20): Xaa is Cys residue protected with ACM protecting group
QEGXRLCAPLRGGSGGCKPXAPGTFSN

SEQ ID NO: 1127 - protein, 33 aa, Artificial Sequence
  peptide sequence within human TNFR2 that represents epitope that TNFR2 agonist antibodies or fragments thereof can bind to
  VARIANT (7)...(7): Xaa is Cys residue protected with ACM protecting group
  VARIANT (25)...(25): Xaa is Cys residue protected with ACM protecting group
CAPLRKXRPGFGVARPCNASMDAVXTSTSPTRC

SEQ ID NO: 1128 - protein, 27 aa, Artificial Sequence
  peptide sequence within human TNFR2 that represents epitope that TNFR2 agonist antibodies or fragments thereof can bind to
  VARIANT (3)...(3): Xaa is Cys residue protected with ACM protecting group
DIXRPHQICNVGGSGGCTSTSPTRSMA

SEQ ID NO: 1129 - protein, 33 aa, Artificial Sequence
  peptide sequence within human TNFR2 that represents epitope that TNFR2 agonist antibodies or fragments thereof can bind to
  VARIANT (4)...(4): Xaa is Cys residue protected with ACM protecting group
  VARIANT (12)...(12): Xaa is Cys residue protected with ACM protecting group
  VARIANT (14)...(14): Xaa is Cys residue protected with ACM protecting group
  VARIANT (20)...(20): Xaa is Cys residue protected with ACM protecting group
  VARIANT (28)...(28): Xaa is Cys residue protected with ACM protecting group
  VARIANT (30)...(30): Xaa is Cys residue protected with ACM protecting group
CQAXTREQNRIXTXRPCQAXTREQNRIXTXRPC

SEQ ID NO: 1130 - protein, 33 aa, Artificial Sequence
  peptide sequence within human TNFR2 that represents epitope that TNFR2 agonist antibodies or fragments thereof can bind to
  VARIANT (8)...(8): Xaa is Cys residue protected with ACM protecting group
  VARIANT (14)...(14): Xaa is Cys residue protected with ACM protecting group
  VARIANT (20)...(20): Xaa is Cys residue protected with ACM protecting group
  VARIANT (28)...(28): Xaa is Cys residue protected with ACM protecting group
  VARIANT (30)...(30): Xaa is Cys residue protected with ACM protecting group
CTSSTDIXRPHQIXNVCQAXTREQNRIXTXRPC

SEQ ID NO: 1131 - protein, 32 aa, Artificial Sequence
  peptide sequence within human TNFR2 that represents epitope that TNFR2 agonist antibodies or fragments thereof can bind to
  VARIANT (23)...(23): Xaa is Cys residue protected with ACM protecting group
CLPAQVAFTPYAPEPGCAPLRKXRPGFGVARP

SEQ ID NO: 1132 - protein, 27 aa, Artificial Sequence
  peptide sequence within human TNFR2 that represents epitope that TNFR2 agonist antibodies or fragments thereof can bind to
  VARIANT (4)...(4): Xaa is Cys residue protected with ACM protecting group
  VARIANT (11)...(11): Xaa is Cys residue protected with ACM protecting group
VPEXLSCGSRXGGSGGETQACTREQNR

SEQ ID NO: 1133 - protein, 33 aa, Artificial Sequence
  peptide sequence within human TNFR2 that represents epitope that TNFR2 agonist antibodies or fragments thereof can bind to
  VARIANT (14)...(14): Xaa is Cys residue protected with ACM protecting group
  VARIANT (23)...(23): Xaa is Cys residue protected with ACM protecting group
CAFTPYAPEPGSTXRLCAPLRKXRPGFGVARPC

SEQ ID NO: 1134 - protein, 33 aa, Artificial Sequence
  peptide sequence within human TNFR2 that represents epitope that TNFR2 agonist antibodies or fragments thereof can bind to
  VARIANT (3)...(3): Xaa is Cys residue protected with ACM protecting group
  VARIANT (9)...(9): Xaa is Cys residue protected with ACM protecting group
  VARIANT (23)...(23): Xaa is Cys residue protected with ACM protecting group
CIXRPHQIXNVVAIPGCAPLRKXRPGFGVARPC

SEQ ID NO: 1135 - protein, 32 aa, Artificial Sequence
  peptide sequence within human TNFR2 that represents epitope that TNFR2 agonist antibodies or fragments thereof can bind to
  VARIANT (23)...(23): Xaa is Cys residue protected with ACM protecting group
CSTSFLLPMGPSPPAECAPLRKXRPGFGVARP

SEQ ID NO: 1136 - protein, 27 aa, Artificial Sequence
  peptide sequence within human TNFR2 that represents epitope that TNFR2 agonist antibodies or fragments thereof can bind to
  VARIANT (1)...(1): Xaa is Cys residue protected with ACM protecting group
  VARIANT (9)...(9): Xaa is Cys residue protected with ACM protecting group
  VARIANT (26)...(26): Xaa is Cys residue protected with ACM protecting group
XTREQNRIXTCGGSGGYCALSKQEGXR

SEQ ID NO: 1137 - protein, 27 aa, Artificial Sequence
  peptide sequence within human TNFR2 that represents epitope that TNFR2 agonist antibodies or fragments thereof can bind to
CAPGTFSNTTSGGSGGTSSTDICRPHQ

SEQ ID NO: 1138 - protein, 33 aa, Artificial Sequence
  peptide sequence within human TNFR2 that represents epitope that TNFR2 agonist antibodies or fragments thereof can bind to
  VARIANT (7)...(7): Xaa is Cys residue protected with ACM protecting group
  VARIANT (8)...(8): Xaa is Cys residue protected with ACM protecting group
  VARIANT (11)...(11): Xaa is Cys residue protected with ACM protecting group
  VARIANT (25)...(25): Xaa is Cys residue protected with ACM protecting group
CQTAQMXXSKXSPGQHCNASMDAVXTSTSPTRC

SEQ ID NO: 1139 - protein, 33 aa, Artificial Sequence
  peptide sequence within human TNFR2 that represents epitope that TNFR2 agonist antibodies or fragments thereof can bind to
  VARIANT (9)...(9): Xaa is Cys residue protected with ACM protecting group
  VARIANT (25)...(25): Xaa is Cys residue protected with ACM protecting group
CNASMDAVXTSTSPTRCNASMDAVXTSTSPTRC

SEQ ID NO: 1140 - protein, 33 aa, Artificial Sequence
  peptide sequence within human TNFR2 that represents epitope that TNFR2 agonist antibodies or fragments thereof can bind to
  VARIANT (12)...(12): Xaa is Cys residue protected with ACM protecting group
  VARIANT (15)...(15): Xaa is Cys residue protected with ACM protecting group
  VARIANT (24)...(24): Xaa is Cys residue protected with ACM protecting group
  VARIANT (27)...(27): Xaa is Cys residue protected with ACM protecting group
CYTQLWNWVPEXLSXGCLSKQEGXRLXAPLRKC

SEQ ID NO: 1141 - protein, 27 aa, Artificial Sequence
  peptide sequence within human TNFR2 that represents epitope that TNFR2 agonist antibodies or fragments thereof can bind to
  VARIANT (20)...(20): Xaa is Cys residue protected with ACM protecting group
  VARIANT (23)...(23): Xaa is Cys residue protected with ACM protecting group
CRLREYYDQTAGGSGGQMCXSKXSPGQ

SEQ ID NO: 1142 - protein, 15 aa, Artificial Sequence
  peptide sequence within human TNFR2 that represents epitope that TNFR2 agonist antibodies or fragments thereof can bind to
MDAVCTSTSPTRSMA

SEQ ID NO: 1143 - protein, 33 aa, Artificial Sequence
  peptide sequence within human TNFR2 that represents epitope that TNFR2 agonist antibodies or fragments thereof can bind to
  VARIANT (20)...(20): Xaa is Cys residue protected with ACM protecting group
  VARIANT (28)...(28): Xaa is Cys residue protected with ACM protecting group
  VARIANT (30)...(30): Xaa is Cys residue protected with ACM protecting group
CAVHLPQPVSTRSQHTCQAXTREQNRIXTXRPC

SEQ ID NO: 1144 - protein, 27 aa, Artificial Sequence
  peptide sequence within human TNFR2 that represents epitope that TNFR2 agonist antibodies or fragments thereof can bind to
  VARIANT (3)...(3): Xaa is Cys residue protected with ACM protecting group
  VARIANT (6)...(6): Xaa is Cys residue protected with ACM protecting group
  VARIANT (26)...(26): Xaa is Cys residue protected with ACM protecting group
PEXLSXGSRCSGGSGGTREQNRICTXR

SEQ ID NO: 1145 - protein, 27 aa, Artificial Sequence
  peptide sequence within human TNFR2 that represents epitope that TNFR2 agonist antibodies or fragments thereof can bind to
  VARIANT (1)...(1): Xaa is Cys residue protected with ACM protecting group
  VARIANT (4)...(4): Xaa is Cys residue protected with ACM protecting group
  VARIANT (24)...(24): Xaa is Cys residue protected with ACM protecting group
XLSXGSRCSSDGGSGGEQNRICTXRPG

SEQ ID NO: 1146 - protein, 27 aa, Artificial Sequence
  peptide sequence within human TNFR2 that represents epitope that TNFR2 agonist antibodies or fragments thereof can bind to
  VARIANT (7)...(7): Xaa is Cys residue protected with ACM protecting group
  VARIANT (25)...(25): Xaa is Cys residue protected with ACM protecting group
REQNRIXTCRPGGSGGCALSKQEGXRL

SEQ ID NO: 1147 - protein, 33 aa, Artificial Sequence
  peptide sequence within human TNFR2 that represents epitope that TNFR2 agonist antibodies or fragments thereof can bind to
  VARIANT (7)...(7): Xaa is Cys residue protected with ACM protecting group
  VARIANT (8)...(8): Xaa is Cys residue protected with ACM protecting group
  VARIANT (11)...(11): Xaa is Cys residue protected with ACM protecting group
  VARIANT (23)...(23): Xaa is Cys residue protected with ACM protecting group
CQTAQMXXSKXSPGQHCAPLRKXRPGFGVARPC

SEQ ID NO: 1148 - protein, 33 aa, Artificial Sequence
  peptide sequence within human TNFR2 that represents epitope that TNFR2 agonist antibodies or fragments thereof can bind to
  VARIANT (2)...(2): Xaa is Cys residue protected with ACM protecting group
  VARIANT (4)...(4): Xaa is Cys residue protected with ACM protecting group
  VARIANT (10)...(10): Xaa is Cys residue protected with ACM protecting group
  VARIANT (23)...(23): Xaa is Cys residue protected with ACM protecting group
CXTXRPGWYXALSKQECAPLRKXRPGFGVARPC

SEQ ID NO: 1149 - protein, 33 aa, Artificial Sequence
  peptide sequence within human TNFR2 that represents epitope that TNFR2 agonist antibodies or fragments thereof can bind to
  VARIANT (7)...(7): Xaa is Cys residue protected with ACM protecting group
  VARIANT (10)...(10): Xaa is Cys residue protected with ACM protecting group
  VARIANT (14)...(14): Xaa is Cys residue protected with ACM protecting group
  VARIANT (25)...(25): Xaa is Cys residue protected with ACM protecting group
CNWVPEXLSXGSRXSSCNASMDAVXTSTSPTRC

SEQ ID NO: 1150 - protein, 27 aa, Artificial Sequence
  peptide sequence within human TNFR2 that represents epitope that TNFR2 agonist antibodies or fragments thereof can bind to
  VARIANT (26)...(26): Xaa is Cys residue protected with ACM protecting group
RCSSDQVETQAGGSGGTREQNRICTXR

SEQ ID NO: 1151 - protein, 15 aa, Artificial Sequence
  peptide sequence within human TNFR2 that represents epitope that TNFR2 agonist antibodies or fragments thereof can bind to
YDQTAQMCCSKCSPG

SEQ ID NO: 1152 - protein, 33 aa, Artificial Sequence
  peptide sequence within human TNFR2 that represents epitope that TNFR2 agonist antibodies or fragments thereof can bind to
  VARIANT (11)...(11): Xaa is Cys residue protected with ACM protecting group
  VARIANT (23)...(23): Xaa is Cys residue protected with ACM protecting group
CSPGQHAKVFXTKTSDCAPLRKXRPGFGVARPC

SEQ ID NO: 1153 - protein, 33 aa, Artificial Sequence
  peptide sequence within human TNFR2 that represents epitope that TNFR2 agonist antibodies or fragments thereof can bind to
  VARIANT (8)...(8): Xaa is Cys residue protected with ACM protecting group
  VARIANT (11)...(11): Xaa is Cys residue protected with ACM protecting group
  VARIANT (25)...(25): Xaa is Cys residue protected with ACM protecting group
CLSKQEGXRLXAPLRKCDQVETQAXTREQNRIC

SEQ ID NO: 1154 - protein, 18 aa, Artificial Sequence
  peptide sequence within human TNFR2 that represents epitope that TNFR2 agonist antibodies or fragments thereof can bind to
CSDQVETQPGTREQNRIC

SEQ ID NO: 1155 - protein, 27 aa, Artificial Sequence
  peptide sequence within human TNFR2 that represents epitope that TNFR2 agonist antibodies or fragments thereof can bind to
  VARIANT (6)...(6): Xaa is Cys residue protected with ACM protecting group
  VARIANT (25)...(25): Xaa is Cys residue protected with ACM protecting group
EQNRIXTCRPGGGSGGCALSKQEGXRL

SEQ ID NO: 1156 - protein, 27 aa, Artificial Sequence
  peptide sequence within human TNFR2 that represents epitope that TNFR2 agonist antibodies or fragments thereof can bind to
  VARIANT (4)...(4): Xaa is Cys residue protected with ACM protecting group
DVVXKPCAPGTGGSGGTSSTDICRPHQ

SEQ ID NO: 1157 - protein, 27 aa, Artificial Sequence
  peptide sequence within human TNFR2 that represents epitope that TNFR2 agonist antibodies or fragments thereof can bind to
  VARIANT (5)...(5): Xaa is Cys residue protected with ACM protecting group
STDIXRPHQICGGSGGCTSTSPTRSMA

SEQ ID NO: 1158 - protein, 33 aa, Artificial Sequence
  peptide sequence within human TNFR2 that represents epitope that TNFR2 agonist antibodies or fragments thereof can bind to
  VARIANT (25)...(25): Xaa is Cys residue protected with ACM protecting group
CPSTAPSTSFLLPMGPCNASMDAVXTSTSPTRC

SEQ ID NO: 1159 - protein, 15 aa, Artificial Sequence
  peptide sequence within human TNFR2 that represents epitope that TNFR2 agonist antibodies or fragments thereof can bind to
GAVHLPQPVSTRSQH

SEQ ID NO: 1160 - protein, 33 aa, Artificial Sequence
  peptide sequence within human TNFR2 that represents epitope that TNFR2 agonist antibodies or fragments thereof can bind to
  VARIANT (12)...(12): Xaa is Cys residue protected with ACM protecting group
  VARIANT (13)...(13): Xaa is Cys residue protected with ACM protecting group
  VARIANT (16)...(16): Xaa is Cys residue protected with ACM protecting group
  VARIANT (20)...(20): Xaa is Cys residue protected with ACM protecting group
  VARIANT (28)...(28): Xaa is Cys residue protected with ACM protecting group
  VARIANT (30)...(30): Xaa is Cys residue protected with ACM protecting group
CREYYDQTAQMXXSKXCQAXTREQNRIXTXRPC

SEQ ID NO: 1161 - protein, 33 aa, Artificial Sequence
  peptide sequence within human TNFR2 that represents epitope that TNFR2 agonist antibodies or fragments thereof can bind to
  VARIANT (2)...(2): Xaa is Cys residue protected with ACM protecting group
  VARIANT (3)...(3): Xaa is Cys residue protected with ACM protecting group
  VARIANT (6)...(6): Xaa is Cys residue protected with ACM protecting group
  VARIANT (16)...(16): Xaa is Cys residue protected with ACM protecting group
  VARIANT (20)...(20): Xaa is Cys residue protected with ACM protecting group
  VARIANT (28)...(28): Xaa is Cys residue protected with ACM protecting group
  VARIANT (30)...(30): Xaa is Cys residue protected with ACM protecting group
CXXSKXSPGQHAKVFXCQAXTREQNRIXTXRPC

SEQ ID NO: 1162 - protein, 33 aa, Artificial Sequence
  peptide sequence within human TNFR2 that represents epitope that TNFR2 agonist antibodies or fragments thereof can bind to
  VARIANT (5)...(5): Xaa is Cys residue protected with ACM protecting group
  VARIANT (13)...(13): Xaa is Cys residue protected with ACM protecting group
  VARIANT (16)...(16): Xaa is Cys residue protected with ACM protecting group
  VARIANT (20)...(20): Xaa is Cys residue protected with ACM protecting group
  VARIANT (28)...(28): Xaa is Cys residue protected with ACM protecting group
  VARIANT (30)...(30): Xaa is Cys residue protected with ACM protecting group
CGWYXALSKQEGXRLXCQAXTREQNRIXTXRPC

SEQ ID NO: 1163 - protein, 33 aa, Artificial Sequence
  peptide sequence within human TNFR2 that represents epitope that TNFR2 agonist antibodies or fragments thereof can bind to
  VARIANT (8)...(8): Xaa is Cys residue protected with ACM protecting group
  VARIANT (11)...(11): Xaa is Cys residue protected with ACM protecting group
  VARIANT (20)...(20): Xaa is Cys residue protected with ACM protecting group
  VARIANT (28)...(28): Xaa is Cys residue protected with ACM protecting group
  VARIANT (30)...(30): Xaa is Cys residue protected with ACM protecting group
CLSKQEGXRLXAPLRKCQAXTREQNRIXTXRPC

SEQ ID NO: 1164 - protein, 33 aa, Artificial Sequence
  peptide sequence within human TNFR2 that represents epitope that TNFR2 agonist antibodies or fragments thereof can bind to
  VARIANT (8)...(8): Xaa is Cys residue protected with ACM protecting group
  VARIANT (14)...(14): Xaa is Cys residue protected with ACM protecting group
  VARIANT (23)...(23): Xaa is Cys residue protected with ACM protecting group
CTSSTDIXRPHQIXNVCAPLRKXRPGFGVARPC

SEQ ID NO: 1165 - protein, 27 aa, Artificial Sequence
  peptide sequence within human TNFR2 that represents epitope that TNFR2 agonist antibodies or fragments thereof can bind to
  VARIANT (1)...(1): Xaa is Cys residue protected with ACM protecting group
  VARIANT (8)...(8): Xaa is Cys residue protected with ACM protecting group
XLSCGSRXSSDGGSGGTQACTREQNRI

SEQ ID NO: 1166 - protein, 33 aa, Artificial Sequence
  peptide sequence within human TNFR2 that represents epitope that TNFR2 agonist antibodies or fragments thereof can bind to
  VARIANT (9)...(9): Xaa is Cys residue protected with ACM protecting group
  VARIANT (30)...(30): Xaa is Cys residue protected with ACM protecting group
CDQVETQAXTREQNRICAFTPYAPEPGSTXRLC

SEQ ID NO: 1167 - protein, 33 aa, Artificial Sequence
  peptide sequence within human TNFR2 that represents epitope that TNFR2 agonist antibodies or fragments thereof can bind to
  VARIANT (9)...(9): Xaa is Cys residue protected with ACM protecting group
  VARIANT (20)...(20): Xaa is Cys residue protected with ACM protecting group
  VARIANT (28)...(28): Xaa is Cys residue protected with ACM protecting group
  VARIANT (30)...(30): Xaa is Cys residue protected with ACM protecting group
CNASMDAVXTSTSPTRCQAXTREQNRIXTXRPC

SEQ ID NO: 1168 - protein, 27 aa, Artificial Sequence
  peptide sequence within human TNFR2 that represents epitope that TNFR2 agonist antibodies or fragments thereof can bind to
  VARIANT (20)...(20): Xaa is Cys residue protected with ACM protecting group
  VARIANT (23)...(23): Xaa is Cys residue protected with ACM protecting group
PEPGSTCRLREGGSGGQMCXSKXSPGQ

SEQ ID NO: 1169 - protein, 27 aa, Artificial Sequence
  peptide sequence within human TNFR2 that represents epitope that TNFR2 agonist antibodies or fragments thereof can bind to
  VARIANT (20)...(20): Xaa is Cys residue protected with ACM protecting group
  VARIANT (23)...(23): Xaa is Cys residue protected with ACM protecting group
STCRLREYYDQGGSGGQMCXSKXSPGQ

SEQ ID NO: 1170 - protein, 15 aa, Artificial Sequence
  peptide sequence within human TNFR2 that represents epitope that TNFR2 agonist antibodies or fragments thereof can bind to
LRKCRPGFGVGAPGT

SEQ ID NO: 1171 - protein, 33 aa, Artificial Sequence
  peptide sequence within human TNFR2 that represents epitope that TNFR2 agonist antibodies or fragments thereof can bind to
  VARIANT (8)...(8): Xaa is Cys residue protected with ACM protecting group
  VARIANT (11)...(11): Xaa is Cys residue protected with ACM protecting group
  VARIANT (28)...(28): Xaa is Cys residue protected with ACM protecting group
  VARIANT (29)...(29): Xaa is Cys residue protected with ACM protecting group
  VARIANT (32)...(32): Xaa is Cys residue protected with ACM protecting group
CLSKQEGXRLXAPLRKCREYYDQTAQMXXSKXC

SEQ ID NO: 1172 - protein, 33 aa, Artificial Sequence
  peptide sequence within human TNFR2 that represents epitope that TNFR2 agonist antibodies or fragments thereof can bind to
  VARIANT (5)...(5): Xaa is Cys residue protected with ACM protecting group
  VARIANT (13)...(13): Xaa is Cys residue protected with ACM protecting group
  VARIANT (16)...(16): Xaa is Cys residue protected with ACM protecting group
  VARIANT (25)...(25): Xaa is Cys residue protected with ACM protecting group
CGWYXALSKQEGXRLXCNASMDAVXTSTSPTRC

SEQ ID NO: 1173 - protein, 33 aa, Artificial Sequence
  peptide sequence within human TNFR2 that represents epitope that TNFR2 agonist antibodies or fragments thereof can bind to
  VARIANT (13)...(13): Xaa is Cys residue protected with ACM protecting group
  VARIANT (25)...(25): Xaa is Cys residue protected with ACM protecting group
CTFSNTTSSTDIXRPHCNASMDAVXTSTSPTRC

SEQ ID NO: 1174 - protein, 27 aa, Artificial Sequence
  peptide sequence within human TNFR2 that represents epitope that TNFR2 agonist antibodies or fragments thereof can bind to
  VARIANT (6)...(6): Xaa is Cys residue protected with ACM protecting group
SCGSRXSSDQVGGSGGTQACTREQNRI

SEQ ID NO: 1175 - protein, 27 aa, Artificial Sequence
  peptide sequence within human TNFR2 that represents epitope that TNFR2 agonist antibodies or fragments thereof can bind to
  VARIANT (6)...(6): Xaa is Cys residue protected with ACM protecting group
  VARIANT (18)...(18): Xaa is Cys residue protected with ACM protecting group
EGCRLXAPLRKGGSGGLXAPLRKCRPG

SEQ ID NO: 1176 - protein, 15 aa, Artificial Sequence
  peptide sequence within human TNFR2 that represents epitope that TNFR2 agonist antibodies or fragments thereof can bind to
TSSTDICRPHAACNV

SEQ ID NO: 1177 - protein, 33 aa, Artificial Sequence
  peptide sequence within human TNFR2 that represents epitope that TNFR2 agonist antibodies or fragments thereof can bind to
  VARIANT (23)...(23): Xaa is Cys residue protected with ACM protecting group
CRSQHTQPTPEPSTAPCAPLRKXRPGFGVARPC

SEQ ID NO: 1178 - protein, 33 aa, Artificial Sequence
  peptide sequence within human TNFR2 that represents epitope that TNFR2 agonist antibodies or fragments thereof can bind to
  VARIANT (9)...(9): Xaa is Cys residue protected with ACM protecting group
  VARIANT (20)...(20): Xaa is Cys residue protected with ACM protecting group
  VARIANT (28)...(28): Xaa is Cys residue protected with ACM protecting group
  VARIANT (30)...(30): Xaa is Cys residue protected with ACM protecting group
CDQVETQAXTREQNRICQAXTREQNRIXTXRPC

SEQ ID NO: 1179 - protein, 33 aa, Artificial Sequence
  peptide sequence within human TNFR2 that represents epitope that TNFR2 agonist antibodies or fragments thereof can bind to
  VARIANT (25)...(25): Xaa is Cys residue protected with ACM protecting group
CTSPTRSMAPGAVHLPCNASMDAVXTSTSPTRC

SEQ ID NO: 1180 - protein, 22 aa, Artificial Sequence
  peptide sequence within human TNFR2 that represents epitope that TNFR2 agonist antibodies or fragments thereof can bind to
  VARIANT (5)...(5): Xaa is Cys residue protected with ACM protecting group
CGSRXSSDQVETQACTREQNRI

SEQ ID NO: 1181 - protein, 27 aa, Artificial Sequence
  peptide sequence within human TNFR2 that represents epitope that TNFR2 agonist antibodies or fragments thereof can bind to
  VARIANT (20)...(20): Xaa is Cys residue protected with ACM protecting group
  VARIANT (23)...(23): Xaa is Cys residue protected with ACM protecting group
APEPGSTCRLRGGSGGQMCXSKXSPGQ

SEQ ID NO: 1182 - protein, 27 aa, Artificial Sequence
  peptide sequence within human TNFR2 that represents epitope that TNFR2 agonist antibodies or fragments thereof can bind to
  VARIANT (2)...(2): Xaa is Cys residue protected with ACM protecting group
  VARIANT (9)...(9): Xaa is Cys residue protected with ACM protecting group
  VARIANT (25)...(25): Xaa is Cys residue protected with ACM protecting group
  VARIANT (27)...(27): Xaa is Cys residue protected with ACM protecting group
EXLSCGSRXSSGGSGGCTREQNRIXTX

SEQ ID NO: 1183 - protein, 27 aa, Artificial Sequence
  peptide sequence within human TNFR2 that represents epitope that TNFR2 agonist antibodies or fragments thereof can bind to
ICNVVAIPGNAGGSGGDAVCTSTSPTR

SEQ ID NO: 1184 - protein, 15 aa, Artificial Sequence
  peptide sequence within human TNFR2 that represents epitope that TNFR2 agonist antibodies or fragments thereof can bind to
APSTSFLLPMAASPP

SEQ ID NO: 1185 - protein, 17 aa, Artificial Sequence
  peptide sequence within human TNFR2 that represents epitope that TNFR2 agonist antibodies or fragments thereof can bind to
CEQNRIATARPAAYAAC

SEQ ID NO: 1186 - protein, 18 aa, Artificial Sequence
  peptide sequence within human TNFR2 that represents epitope that TNFR2 agonist antibodies or fragments thereof can bind to
CQVAFTPYPGEPGSTARC

SEQ ID NO: 1187 - protein, 27 aa, Artificial Sequence
  peptide sequence within human TNFR2 that represents epitope that TNFR2 agonist antibodies or fragments thereof can bind to
RPHQICNVVAIGGSGGCTSTSPTRSMA

SEQ ID NO: 1188 - protein, 15 aa, Artificial Sequence
  peptide sequence within human TNFR2 that represents epitope that TNFR2 agonist antibodies or fragments thereof can bind to
TRSMAPGAVHLPQPV

SEQ ID NO: 1189 - protein, 27 aa, Artificial Sequence
  peptide sequence within human TNFR2 that represents epitope that TNFR2 agonist antibodies or fragments thereof can bind to
  VARIANT (5)...(5): Xaa is Cys residue protected with ACM protecting group
  VARIANT (25)...(25): Xaa is Cys residue protected with ACM protecting group
QNRIXTCRPGWGGSGGCALSKQEGXRL

SEQ ID NO: 1190 - protein, 27 aa, Artificial sequence
  peptide sequence within TNFR2 that represents epitopes that TNFR2 agonist antibodies can bind to
  VARIANT (8)...(8): Xaa is Cys residue protected with ACM protecting group
  VARIANT (20)...(20): Xaa is Cys residue protected with ACM protecting group
ALSKQEGXRLCGGSGGCKPXAPGTFSN

SEQ ID NO: 1191 - protein, 33 aa, Artificial Sequence
  peptide sequence within human TNFR2 that represents epitope that TNFR2 agonist antibodies or fragments thereof can bind to
  VARIANT (15)...(15): Xaa is Cys residue protected with ACM protecting group
  VARIANT (23)...(23): Xaa is Cys residue protected with ACM protecting group
CGVARPGTETSDVVXKCAPLRKXRPGFGVARPC

SEQ ID NO: 1192 - protein, 27 aa, Artificial Sequence
  peptide sequence within human TNFR2 that represents epitope that TNFR2 agonist antibodies or fragments thereof can bind to
PCAPGTFSNTTGGSGGTSSTDICRPHQ

SEQ ID NO: 1193 - protein, 33 aa, Artificial Sequence
  peptide sequence within human TNFR2 that represents epitope that TNFR2 agonist antibodies or fragments thereof can bind to
  VARIANT (14)...(14): Xaa is Cys residue protected with ACM protecting group
  VARIANT (20)...(20): Xaa is Cys residue protected with ACM protecting group
  VARIANT (28)...(28): Xaa is Cys residue protected with ACM protecting group
  VARIANT (30)...(30): Xaa is Cys residue protected with ACM protecting group
CAFTPYAPEPGSTXRLCQAXTREQNRIXTXRPC

SEQ ID NO: 1194 - protein, 33 aa, Artificial Sequence
  peptide sequence within human TNFR2 that represents epitope that TNFR2 agonist antibodies or fragments thereof can bind to
  VARIANT (10)...(10): Xaa is Cys residue protected with ACM protecting group
  VARIANT (13)...(13): Xaa is Cys residue protected with ACM protecting group
  VARIANT (23)...(23): Xaa is Cys residue protected with ACM protecting group
CGTETSDVVXKPXAPGCAPLRKXRPGFGVARPC

SEQ ID NO: 1195 - protein, 185 aa, Artificial Sequence
  peptide derived from human TNFR2 with affinity for binding agonistic antibody MR2-1
YYDQTAQMCCSKCSPGQHAKVFCTKTSDTVCDSCEDSTYTQLWNWVPECLSCGSRCSSDQVETQACTREQNRICTCRPGWYCALSKQEGCRLCAPLRKCRPGFGVARPGTETSDVVCKPCAPGTFSNTTSSTDICRPHQICNVVAIPGNASMDAVCTSTSPTRSMAPGAVHLPQPVSTRSQHTQP

SEQ ID NO: 1196 - protein, 20 aa, Artificial Sequence
  peptide sequence within human TNFR2 that represents epitope that TNFR2 agonist antibodies and fragments thereof can bind to
QTAQMCCSKCSPGQHAKVFC

SEQ ID NO: 1197 - protein, 20 aa, Artificial Sequence
  peptide derived from human TNFR2 with affinity for binding agonistic antibody MR2-1
REQNRICTCRPGWYCALSKQ

SEQ ID NO: 1198 - protein, 20 aa, Artificial Sequence
  peptide derived from human TNFR2 with affinity for binding agonistic antibody MR2-1
CRPGWYCALSKQEGCRLCAP

SEQ ID NO: 1199 - protein, 20 aa, Artificial Sequence
  peptide derived from human TNFR2 with affinity for binding agonistic antibody MR2-1
LSKQEGCRLCAPLRKCRPGF

SEQ ID NO: 1200 - protein, 20 aa, Artificial Sequence
  peptide derived from human TNFR2 with affinity for binding agonistic antibody MR2-1
KQEGCRLCAPLRKCRPGFGV

SEQ ID NO: 1201 - protein, 5 aa, Artificial Sequence
  peptide sequence within human TNFR2 that represents epitope that TNFR2 agonist antibodies and fragments thereof can bind to
KCSPG

SEQ ID NO: 1202 - protein, 7 aa, Artificial Sequence
  human TNFR2 epitope to which agonist antibody MR2-1 binds
SSDQVET

SEQ ID NO: 1203 - protein, 28 aa, Artificial Sequence
  peptide sequence within human TNFR2 that represents epitope that TNFR2 agonist antibodies and fragments thereof can bind to
NRICTCRPGWYCALSKQEGCRLCAPLRK

SEQ ID NO: 1204 - protein, 40 aa, Artificial Sequence; identical to SEQ ID NO: 842
  human TNFR2 epitope to which agonist antibody MR2-1 binds

SEQ ID NO: 1205 - protein, 59 aa, Artificial Sequence; identical to SEQ ID NO: 841
  peptide sequence within human TNFR2 that represents epitope that TNFR2 agonist antibodies and fragments thereof can bind to

SEQ ID NO: 1206 - protein, 17 aa, Artificial Sequence
  epitope within human TNFR2 that may bind agonistic TNFR2 antibodies and fragments thereof
CGSRCSSDQVETQACTR

SEQ ID NO: 1207 - protein, 39 aa, Artificial Sequence
  epitope within human TNFR2 that may bind agonistic TNFR2 antibodies and fragments thereof
CTREQNRICTCRPGWYCALSKQEGCRLCAPLRKCRPSGF

SEQ ID NO: 1208 - protein, 50 aa, Artificial Sequence; identical to SEQ ID NO: 850
  epitope within human TNFR2 that may bind agonistic TNFR2 antibodies and fragments thereof

SEQ ID NO: 1209 - protein, 5 aa, Artificial Sequence
  epitope within human TNFR2 that may bind agonistic TNFR2 antibodies and fragments thereof
KCRPG

SEQ ID NO: 1210 - protein, 8 aa, Artificial Sequence
  epitope within human TNFR2 that may bind agonistic TNFR2 antibodies and fragments thereof
CAPLRKCR

SEQ ID NO: 1211 - protein, 8 aa, Artificial Sequence
  epitope within human TNFR2 that may bind agonistic TNFR2 antibodies and fragments thereof
KCRPGFGV

SEQ ID NO: 1212 - protein, 123 aa, Artificial Sequence
  TNFRAB1 (human TNFR2 antagonist antibody) heavy chain
  VARIANT (26)...(32): CDR-H1 = GFTFSSY
  VARIANT (52)...(57): CDR-H2 = SSGGSY
  VARIANT (99)...(112): CDR-H3 = QRVDGYSSYWYFDV
EVQLQESGGGLVKPGGSLKLSCAASGFTFSSYVMSWVRQTPEKRLEWVATISSGGSYTYYPDSVKGRFTISRDNAKNTLYLQMSSLRSEDTAMYYCARQRVDGYSSYWYFDVWGAGTAVTVSS

SEQ ID NO: 1213 - protein, 108 aa, Artificial Sequence
  TNFRAB1 (human TNFR2 antagonist antibody) light chain
  VARIANT (24)...(33): CDR-L1 = SASSSVYYMY
  VARIANT (49)...(55): CDR-L2 = STSNLAS
  VARIANT (88)...(96): CDR-L3 = QQRRNYPYT
DIVLTQSPAIMSASPGEKVTITCSASSSVYYMYWFQQKPGTSPKLWIYSTSNLASGVPVRFSGSGSGTSYSLTISRMEAEDAATYYCQQRRNYPYTFGGGTKLEIKRA

SEQ ID NO: 1214 - protein, 8 aa, Artificial Sequence
  TNFRAB2 (human TNFR2 antagonist antibody) heavy chain CDR-H1 variant 1
GYTFTDYL

SEQ ID NO: 1215 - protein, 8 aa, Artificial Sequence
  TNFRAB2 (human TNFR2 antagonist antibody) heavy chain CDR-H1 variant 2
GYTFTDYI

SEQ ID NO: 1216 - protein, 8 aa, Artificial Sequence
  TNFRAB2 (human TNFR2 antagonist antibody) heavy chain CDR-H2
VDPEYGST

SEQ ID NO: 1217 - protein, 14 aa, Artificial Sequence
  TNFRAB2 (human TNFR2 antagonist antibody) heavy chain CDR-H3
ARDDGSYSPFDYWG

SEQ ID NO: 1218 - protein, 6 aa, Artificial Sequence
  TNFRAB2 (human TNFR2 antagonist antibody) light chain CDR-L1
QNINKY

SEQ ID NO: 1219 - protein, 3 aa, Artificial Sequence
  TNFRAB2 (human TNFR2 antagonist antibody) light chain CDR-L2 variant 1
TYS

SEQ ID NO: 1220 - protein, 3 aa, Artificial Sequence
  TNFRAB2 (human TNFR2 antagonist antibody) light chain CDR-L2 variant 2
YTS

SEQ ID NO: 1221 - protein, 9 aa, Artificial Sequence
  TNFRAB2 (human TNFR2 antagonist antibody) light chain CDR-L3 variant 1
CLQYVNLLT

SEQ ID NO: 1222 - protein, 9 aa, Artificial Sequence
  TNFRAB2 (human TNFR2 antagonist antibody) light chain CDR-L3 variant 2
CLQYVNLIT

SEQ ID NO: 1223 - protein, 14 aa, Artificial Sequence
  TNFR2A3 (human TNFR2 antagonist antibody) heavy chain CDR-H3
ARDDGSYSPFDYFG

SEQ ID NO: 1224 - protein, 8 aa, Artificial Sequence
  CDR-H2 of human TNFR2 antagonist antibody (or antigen-binding fragment thereof)
  VARIANT (6)...(6): Xaa is Gly or Ala
  VARIANT (7)...(7): Xaa is Asn, Gln, Ser, or Thr
VDPEYXXT

SEQ ID NO: 1225 - protein, 14 aa, Artificial Sequence
  CDR-H3 of human TNFR2 antagonist antibody (or antigen-binding fragment thereof)
  VARIANT (2)...(2): Xaa is Arg, Lys, or His
  VARIANT (4)...(4): Xaa is Asp or Glu
  VARIANT (5)...(5): Xaa is Gly or Ala
  VARIANT (7)...(7): Xaa is Asn, Gln, Ser, or Thr
  VARIANT (9)...(9): Xaa is Ala, Val, Leu, Ile, Pro, Met, Trp, Phe, or Tyr
  VARIANT (12)...(12): Xaa is Ala, Val, Leu, Ile, Pro, Met, Trp, Phe, or Tyr
  VARIANT (13)...(13): Xaa is Asp or Glu
  VARIANT (14)...(14): Xaa is Ala, Val, Leu, Ile, Pro, Met, Trp, Phe, or Tyr
QXVXXYXSXWYXXX

SEQ ID NO: 1226 - protein, 14 aa, Artificial Sequence
  CDR-H3 of human TNFR2 antagonist antibody (or antigen-binding fragment thereof)
  VARIANT (2)...(2): Xaa is Lys, Arg, or His
  VARIANT (4)...(4): Xaa is Asp or Glu
  VARIANT (5)...(5): Xaa is Gly or Ala
  VARIANT (6)...(6): Xaa is Asn, Gln, Ser, or Thr
  VARIANT (7)...(7): Xaa is Ala, Val, Leu, Ile, Pro, Met, Trp, Phe, or Tyr
  VARIANT (10)...(10): Xaa is Ala, Val, Leu, Ile, Pro, Met, Trp, Phe, or Tyr
  VARIANT (11)...(11): Xaa is Asp or Glu
  VARIANT (12)...(12): Xaa is Ala, Val, Leu, Ile, Pro, Met, Trp, Phe, or Tyr
AXDXXXXSPXXXWG

SEQ ID NO: 1227 - protein, 14 aa, Artificial Sequence
  CDR-H3 of human TNFR2 antagonist antibody (or antigen-binding fragment thereof)
  VARIANT (1)...(1): Xaa is any amino acid
  VARIANT (3)...(3): Xaa is any amino acid
  VARIANT (6)...(6): Xaa is any amino acid
  VARIANT (8)...(8): Xaa is any amino acid
  VARIANT (10)...(10): Xaa is any amino acid
  VARIANT (11)...(11): Xaa is any amino acid
  VARIANT (14)...(14): Xaa is any amino acid
XRXDGXSXYXXFDX

SEQ ID NO: 1228 - protein, 14 aa, Artificial Sequence
  CDR-H3 of human TNFR2 antagonist antibody (or antigen-binding fragment thereof)
  VARIANT (1)...(1): Xaa is any amino acid
  VARIANT (3)...(3): Xaa is any amino acid
  VARIANT (8)...(8): Xaa is any amino acid
  VARIANT (9)...(9): Xaa is any amino acid
  VARIANT (12)...(12): Xaa is any amino acid
  VARIANT (13)...(13): Xaa is any amino acid
  VARIANT (14)...(14): Xaa is any amino acid
XRXDGSYXXFDXXX

SEQ ID NO: 1229 - protein, 14 aa, Artificial Sequence
  CDR-H3 of human TNFR2 antagonist antibody (or antigen-binding fragment thereof)
QRVDGYSSYWYFDV

SEQ ID NO: 1230 - protein, 6 aa, Artificial Sequence
  CDR-H2 of human TNFR2 antagonist antibody (or antigen-binding fragment thereof)
SSGGSY

SEQ ID NO: 1231 - protein, 7 aa, Artificial Sequence
  CDR-H1 of human TNFR2 antagonist antibody (or antigen-binding fragment thereof)
GFTFSSY

SEQ ID NO: 1232 - protein, 8 aa, Artificial Sequence
  CDR-H1 of human TNFR2 antagonist antibody (or antigen-binding fragment thereof)
  VARIANT (2)...(2): Xaa is any amino acid
  VARIANT (5)...(5): Xaa is any amino acid
  VARIANT (6)...(6): Xaa is any amino acid
  VARIANT (8)...(8): Xaa is any amino acid
GXTFXXYX

SEQ ID NO: 1233 - protein, 8 aa, Artificial Sequence
  CDR-H1 of human TNFR2 antagonist antibody (or antigen-binding fragment thereof)
  VARIANT (8)...(8): Xaa is Leu or Ile
GYTFTDYX

SEQ ID NO: 1234 - protein, 6 aa, Artificial Sequence
  CDR-L1 of human TNFR2 antagonist antibody (or antigen-binding fragment thereof)
  VARIANT (6)...(6): Xaa is Ala, Val, Leu, Ile, Pro, Met, Trp, Phe, or Tyr
QNINKX

SEQ ID NO: 1235 - protein, 10 aa, Artificial Sequence
  CDR-L1 of human TNFR2 antagonist antibody (or antigen-binding fragment thereof)
SASSSVYYMY

SEQ ID NO: 1236 - protein, 15 aa, Artificial Sequence
  CDR-L1 of human TNFR2 antagonist antibody (or antigen-binding fragment thereof)
RASKSVSTSGYSYMH

SEQ ID NO: 1237 - protein, 7 aa, Artificial Sequence
  CDR-L2 of human TNFR2 antagonist antibody (or antigen-binding fragment thereof)
STSNLAS

SEQ ID NO: 1238 - protein, 7 aa, Artificial Sequence
  CDR-L2 of human TNFR2 antagonist antibody (or antigen-binding fragment thereof)
LASNLES

SEQ ID NO: 1239 - protein, 4 aa, Artificial Sequence
  framework region bound to the N-terminus of CDR-L2 of human TNFR2 antagonist antibody (or antigen-binding fragment thereof)
LLIR

SEQ ID NO: 1240 - protein, 3 aa, Artificial Sequence
  framework region bound to the C-terminus of CDR-L2 of human TNFR2 antagonist antibody (or antigen-binding fragment thereof)
TLE

SEQ ID NO: 1241 - protein, 9 aa, Artificial Sequence
  CDR-L3 of human TNFR2 antagonist antibody (or antigen-binding fragment thereof)
  VARIANT (4)...(4): Xaa is Ala, Val, Leu, Ile, Pro, Met, Trp, Phe, or Tyr
  VARIANT (8)...(8): Xaa is Leu or Ile
  VARIANT (9)...(9): Xaa is Asn, Gln, Ser, or Thr
CLQXVNLXX

SEQ ID NO: 1242 - protein, 9 aa, Artificial Sequence
  CDR-L3 of human TNFR2 antagonist antibody (or antigen-binding fragment thereof)
QQRRNYPYT

SEQ ID NO: 1243 - protein, 9 aa, Artificial Sequence
  CDR-L3 of human TNFR2 antagonist antibody (or antigen-binding fragment thereof)
  VARIANT (8)...(8): Xaa is Leu or Ile
CLQYVNLXT

SEQ ID NO: 1244 - protein, 9 aa, Artificial Sequence
  CDR-L3 of human TNFR2 antagonist antibody (or antigen-binding fragment thereof)
QHSRELPRT

SEQ ID NO: 1245 - protein, 120 aa, Artificial Sequence
  exemplary consensus sequence of a human antibody heavy chain variable domain
  VARIANT (26)...(35): CDR-H1 that can be replaced = GFTFSDYAMS
  VARIANT (50)...(66): CDR-H2 that can be replaced = VISENGSDTYYADSVKG
  VARIANT (99)...(110): CDR-H3 that can be replaced = DRGGAVSYFDVW
EVQLVESGGGLVQPGGSLRLSCAASGFTFSDYAMSWVRQAPGKGLEWVAVISENGSDTYYADSVKGRFTISRDDSKNTLYLQMNSLRAEDTAVYYCARDRGGAVSYFDVWGQGTLVTVSS

SEQ ID NO: 1246 - protein, 109 aa, Artificial Sequence
  exemplary consensus sequence of human antibody light chain variable domain
  VARIANT (24)...(35): CDR-L1 that can be replaced = RASQDVSSYLAW
  VARIANT (50)...(56): CDR-L2 that can be replaced = AASSLES
  VARIANT (89)...(97): CDR-L3 that can be replaced = QQYNSLPYT
DIQMTQSPSSLSASVGDRVTITCRASQDVSSYLAWYQQKPGKAPKLLIYAASSLESGVPSRFSGSGSGTDFTLTISSLQPEDFATYYCQQYNSLPYTFGQGTKVEIKRT

SEQ ID NO: 1247 - protein, 7 aa, Artificial Sequence
  Epitope within human TNFR2 that antagonistic antibodies or fragments thereof bind to
DSTYTQL

SEQ ID NO: 1248 - protein, 8 aa, Artificial Sequence
  Epitope within human TNFR2 that antagonistic antibodies or fragments thereof bind to
PECLSCGS

SEQ ID NO: 1249 - protein, 8 aa, Artificial Sequence
  Epitope within human TNFR2 that antagonistic antibodies or fragments thereof bind to
RICTCRPG

SEQ ID NO: 1250 - protein, 8 aa, Artificial Sequence
  Epitope within human TNFR2 that antagonistic antibodies or fragments thereof bind to
CAPLRKCR

SEQ ID NO: 1251 - protein, 54 aa, Artificial Sequence
  epitope within human TNFR2 to which antagonistic TNFR2 antibodies or fragments thereof can bind (at least 5 continuous or discontinuous residues)
CDSCEDSTYTQLWNWVPECLSCGSRCSSDQVETQACTREQNRICTCRPGWYCAL

SEQ ID NO: 1252 - protein, 16 aa, Artificial Sequence
  epitope within human TNFR2 to which antagonistic TNFR2 antibodies or fragments thereof can bind (at least 5 continuous or discontinuous residues)
CDSCEDSTYTQLWNWV

SEQ ID NO: 1253 - protein, 16 aa, Artificial Sequence
  epitope within human TNFR2 to which antagonistic TNFR2 antibodies or fragments thereof can bind (at least 5 continuous or discontinuous residues)
LWNWVPECLSCGSRCS

SEQ ID NO: 1254 - protein, 16 aa, Artificial Sequence
  epitope within human TNFR2 to which antagonistic TNFR2 antibodies or fragments thereof can bind (at least 5 continuous or discontinuous residues)
TREQNRICTCRPGWYC

SEQ ID NO: 1255 - protein, 16 aa, Artificial Sequence
  epitope within human TNFR2 to which antagonistic TNFR2 antibodies or fragments thereof can bind (at least 5 continuous or discontinuous residues)
KQEGCRLCAPLRKCRP

SEQ ID NO: 1256 - protein, 5 aa, Artificial Sequence
  epitope within human TNFR2 to which antagonistic TNFR2 antibodies or fragments thereof bind
KCRPG

SEQ ID NO: 1257 - protein, 8 aa, Artificial Sequence
  epitope within human TNFR2 to which antagonistic antibodies or fragments thereof bind
KCRPGFGV

SEQ ID NO: 1258 - protein, 9 aa, Artificial Sequence
  epitope within human TNFR2 to which antagonistic antibodies (such as TNFRAB1) or fragments thereof bind
CKPCAPGTF

SEQ ID NO: 1259 - protein, 41 aa, Artificial Sequence
  epitope within human TNFR2 to which antagonistic TNFR2 antibodies or fragments thereof can bind (at least 5 continuous or discontinuous residues)
ARPGTETSDVVCKPCAPGTFSNTTSSTDICRPHQICNVVAI

SEQ ID NO: 1260 - protein, 27 aa, Artificial Sequence
  epitope within human TNFR2 to which antagonistic antibodies or fragments thereof bind
  VARIANT (3)...(3): Xaa is Cys residue protected with ACM protecting group
  VARIANT (6)...(6): Xaa is Cys residue protected with ACM protecting group
  VARIANT (22)...(22): Xaa is Cys residue protected with ACM protecting group
PEXLSXGSRCSGGSGGNRICTXRPGWY

SEQ ID NO: 1261 - protein, 27 aa, Artificial Sequence
  epitope within human TNFR2 to which antagonistic antibodies or fragments thereof bind
  VARIANT (1)...(1): Xaa is Cys residue protected with ACM protecting group
  VARIANT (4)...(4): Xaa is Cys residue protected with ACM protecting group
  VARIANT (22)...(22): Xaa is Cys residue protected with ACM protecting group
XLSXGSRCSSDGGSGGNRICTXRPGWY

SEQ ID NO: 1262 - protein, 27 aa, Artificial Sequence
  epitope within human TNFR2 to which antagonistic antibodies or fragments thereof bind
  VARIANT (4)...(4): Xaa is Cys residue protected with ACM protecting group
  VARIANT (7)...(7): Xaa is Cys residue protected with ACM protecting group
  VARIANT (22)...(22): Xaa is Cys residue protected with ACM protecting group
VPEXLSXGSRCGGSGGNRICTXRPGWY

SEQ ID NO: 1263 - protein, 27 aa, Artificial Sequence
  epitope within human TNFR2 to which antagonistic antibodies or fragments thereof bind
  VARIANT (3)...(3): Xaa is Cys residue protected with ACM protecting group
  VARIANT (22)...(22): Xaa is Cys residue protected with ACM protecting group
LSXGSRCSSDQGGSGGNRICTXRPGWY

SEQ ID NO: 1264 - protein, 27 aa, Artificial Sequence
  epitope within human TNFR2 to which antagonistic antibodies or fragments thereof bind
  VARIANT (3)...(3): Xaa is Cys residue protected with ACM protecting group
  VARIANT (6)...(6): Xaa is Cys residue protected with ACM protecting group
  VARIANT (19)...(19): Xaa is Cys residue protected with ACM protecting group
  VARIANT (25)...(25): Xaa is Cys residue protected with ACM protecting group
PEXLSXGSRCSGGSGGCTXRPGWYXAL

SEQ ID NO: 1265 - protein, 27 aa, Artificial Sequence
  epitope within human TNFR2 to which antagonistic antibodies or fragments thereof bind
  VARIANT (2)...(2): Xaa is Cys residue protected with ACM protecting group
  VARIANT (22)...(22): Xaa is Cys residue protected with ACM protecting group
SXGSRCSSDQVGGSGGNRICTXRPGWY

SEQ ID NO: 1266 - protein, 27 aa, Artificial Sequence
  epitope within human TNFR2 to which antagonistic antibodies or fragments thereof bind
  VARIANT (1)...(1): Xaa is Cys residue protected with ACM protecting group
  VARIANT (21)...(21): Xaa is Cys residue protected with ACM protecting group
  VARIANT (27)...(27): Xaa is Cys residue protected with ACM protecting group
XGSRCSSDQVEGGSGGRICTXRPGWYX

SEQ ID NO: 1267 - protein, 27 aa, Artificial Sequence
  epitope within human TNFR2 to which antagonistic antibodies or fragments thereof bind
  VARIANT (2)...(2): Xaa is Cys residue protected with ACM protecting group
  VARIANT (5)...(5): Xaa is Cys residue protected with ACM protecting group
  VARIANT (19)...(19): Xaa is Cys residue protected with ACM protecting group
  VARIANT (25)...(25): Xaa is Cys residue protected with ACM protecting group
EXLSXGSRCSSGGSGGCTXRPGWYXAL

SEQ ID NO: 1268 - protein, 27 aa, Artificial Sequence
  epitope within human TNFR2 to which antagonistic antibodies or fragments thereof bind
  VARIANT (6)...(6): Xaa is Cys residue protected with ACM protecting group
  VARIANT (17)...(17): Xaa is Cys residue protected with ACM protecting group
EGCRLXAPLRKGGSGGXAPLRKCRPGF

SEQ ID NO: 1269 - protein, 27 aa, Artificial Sequence
  epitope within human TNFR2 to which antagonistic antibodies or fragments thereof bind
  VARIANT (1)...(1): Xaa is Cys residue protected with ACM protecting group
  VARIANT (4)...(4): Xaa is Cys residue protected with ACM protecting group
  VARIANT (19)...(19): Xaa is Cys residue protected with ACM protecting group
  VARIANT (25)...(25): Xaa is Cys residue protected with ACM protecting group
XLSXGSRCSSDGGSGGCTXRPGWYXAL

SEQ ID NO: 1270 - protein, 27 aa, Artificial Sequence
  epitope within human TNFR2 to which antagonistic antibodies or fragments thereof bind
  VARIANT (11)...(11): Xaa is Cys residue protected with ACM protecting group
  VARIANT (21)...(21): Xaa is Cys residue protected with ACM protecting group
  VARIANT (27)...(27): Xaa is Cys residue protected with ACM protecting group
CSSDQVETQAXGGSGGRICTXRPGWYX

SEQ ID NO: 1271 - protein, 27 aa, Artificial Sequence
  epitope within human TNFR2 to which antagonistic antibodies or fragments thereof bind
  VARIANT (21)...(21): Xaa is Cys residue protected with ACM protecting group
  VARIANT (27)...(27): Xaa is Cys residue protected with ACM protecting group
GSRCSSDQVETGGSGGRICTXRPGWYX

SEQ ID NO: 1272 - protein, 27 aa, Artificial Sequence
  epitope within human TNFR2 to which antagonistic antibodies or fragments thereof bind
  VARIANT (1)...(1): Xaa is Cys residue protected with ACM protecting group
  VARIANT (22)...(22): Xaa is Cys residue protected with ACM protecting group
XGSRCSSDQVEGGSGGNRICTXRPGWY

SEQ ID NO: 1273 - protein, 27 aa, Artificial Sequence
  epitope within human TNFR2 to which antagonistic antibodies or fragments thereof bind
  VARIANT (22)...(22): Xaa is Cys residue protected with ACM protecting group
GSRCSSDQVETGGSGGNRICTXRPGWY

SEQ ID NO: 1274 - protein, 27 aa, Artificial Sequence
  epitope within human TNFR2 to which antagonistic antibodies or fragments thereof bind
  VARIANT (3)...(3): Xaa is Cys residue protected with ACM protecting group
  VARIANT (6)...(6): Xaa is Cys residue protected with ACM protecting group
  VARIANT (21)...(21): Xaa is Cys residue protected with ACM protecting group
  VARIANT (27)...(27): Xaa is Cys residue protected with ACM protecting group
PEXLSXGSRCSGGSGGRICTXRPGWYX

SEQ ID NO: 1275 - protein, 27 aa, Artificial Sequence
  epitope within human TNFR2 to which antagonistic antibodies or fragments thereof bind
  VARIANT (4)...(4): Xaa is Cys residue protected with ACM protecting group
  VARIANT (7)...(7): Xaa is Cys residue protected with ACM protecting group
  VARIANT (23)...(23): Xaa is Cys residue protected with ACM protecting group
VPEXLSXGSRCGGSGGQNRICTXRPGW

SEQ ID NO: 1276 - protein, 27 aa, Artificial Sequence
  epitope within human TNFR2 to which antagonistic antibodies or fragments thereof bind
  VARIANT (7)...(7): Xaa is Cys residue protected with ACM protecting group
  VARIANT (17)...(17): Xaa is Cys residue protected with ACM protecting group
QEGCRLXAPLRGGSGGXAPLRKCRPGF

SEQ ID NO: 1277 - protein, 27 aa, Artificial Sequence
  epitope within human TNFR2 to which antagonistic antibodies or fragments thereof bind
  VARIANT (21)...(21): Xaa is Cys residue protected with ACM protecting group
  VARIANT (27)...(27): Xaa is Cys residue protected with ACM protecting group
SRCSSDQVETQGGSGGRICTXRPGWYX

SEQ ID NO: 1278 - protein, 27 aa, Artificial Sequence
  epitope within human TNFR2 to which antagonistic antibodies or fragments thereof bind
  VARIANT (11)...(11): Xaa is Cys residue protected with ACM protecting group
  VARIANT (17)...(17): Xaa is Cys residue protected with ACM protecting group
ALSKQEGCRLXGGSGGXAPLRKCRPGF

SEQ ID NO: 1279 - protein, 27 aa, Artificial Sequence
  epitope within human TNFR2 to which antagonistic antibodies or fragments thereof bind
  VARIANT (7)...(7): Xaa is Cys residue protected with ACM protecting group
QEGCRLXAPLRGGSGGPLRKCRPGFGV

SEQ ID NO: 1280 - protein, 27 aa, Artificial Sequence
  epitope within human TNFR2 to which antagonistic antibodies or fragments thereof bind
  VARIANT (2)...(2): Xaa is Cys residue protected with ACM protecting group
YXALSKQEGCRGGSGGAPLRKCRPGFG

SEQ ID NO: 1281 - protein, 27 aa, Artificial Sequence
  epitope within human TNFR2 to which antagonistic antibodies or fragments thereof bind
  VARIANT (3)...(3): Xaa is Cys residue protected with ACM protecting group
  VARIANT (21)...(21): Xaa is Cys residue protected with ACM protecting group
  VARIANT (27)...(27): Xaa is Cys residue protected with ACM protecting group
LSXGSRCSSDQGGSGGRICTXRPGWYX

SEQ ID NO: 1282 - protein, 27 aa, Artificial Sequence
  epitope within human TNFR2 to which antagonistic antibodies or fragments thereof bind
  VARIANT (3)...(3): Xaa is Cys residue protected with ACM protecting group
  VARIANT (6)...(6): Xaa is Cys residue protected with ACM protecting group
  VARIANT (23)...(23): Xaa is Cys residue protected with ACM protecting group
PEXLSXGSRCSGGSGGQNRICTXRPGW

SEQ ID NO: 1283 - protein, 27 aa, Artificial Sequence
  epitope within human TNFR2 to which antagonistic antibodies or fragments thereof bind
  VARIANT (21)...(21): Xaa is Cys residue protected with ACM protecting group
  VARIANT (27)...(27): Xaa is Cys residue protected with ACM protecting group
RCSSDQVETQAGGSGGRICTXRPGWYX

SEQ ID NO: 1284 - protein, 27 aa, Artificial Sequence
  epitope within human TNFR2 to which antagonistic antibodies or fragments thereof bind
  VARIANT (3)...(3): Xaa is Cys residue protected with ACM protecting group
  VARIANT (6)...(6): Xaa is Cys residue protected with ACM protecting group
  VARIANT (20)...(20): Xaa is Cys residue protected with ACM protecting group
  VARIANT (26)...(26): Xaa is Cys residue protected with ACM protecting group
PEXLSXGSRCSGGSGGICTXRPGWYXA

SEQ ID NO: 1285 - protein, 27 aa, Artificial Sequence
  epitope within human TNFR2 to which antagonistic antibodies or fragments thereof bind
  VARIANT (4)...(4): Xaa is Cys residue protected with ACM protecting group
  VARIANT (7)...(7): Xaa is Cys residue protected with ACM protecting group
  VARIANT (20)...(20): Xaa is Cys residue protected with ACM protecting group
  VARIANT (26)...(26): Xaa is Cys residue protected with ACM protecting group
VPEXLSXGSRCGGSGGICTXRPGWYXA

SEQ ID NO: 1286 - protein, 27 aa, Artificial Sequence
  epitope within human TNFR2 to which antagonistic antibodies or fragments thereof bind
  VARIANT (2)...(2): Xaa is Cys residue protected with ACM protecting group
  VARIANT (19)...(19): Xaa is Cys residue protected with ACM protecting group
  VARIANT (25)...(25): Xaa is Cys residue protected with ACM protecting group
SXGSRCSSDQVGGSGGCTXRPGWYXAL

SEQ ID NO: 1287 - protein, 27 aa, Artificial Sequence
  epitope within human TNFR2 to which antagonistic antibodies or fragments thereof bind
  VARIANT (3)...(3): Xaa is Cys residue protected with ACM protecting group
WYXALSKQEGCGGSGGAPLRKCRPGFG

SEQ ID NO: 1288 - protein, 27 aa, Artificial Sequence
  epitope within human TNFR2 to which antagonistic antibodies or fragments thereof bind
  VARIANT (10)...(10): Xaa is Cys residue protected with ACM protecting group
  VARIANT (17)...(17): Xaa is Cys residue protected with ACM protecting group
LSKQEGCRLXAGGSGGXAPLRKCRPGF

SEQ ID NO: 1289 - protein, 27 aa, Artificial Sequence
  epitope within human TNFR2 to which antagonistic antibodies or fragments thereof bind
  VARIANT (8)...(8): Xaa is Cys residue protected with ACM protecting group
  VARIANT (17)...(17): Xaa is Cys residue protected with ACM protecting group
KQEGCRLXAPLGGSGGXAPLRKCRPGF

SEQ ID NO: 1290 - protein, 27 aa, Artificial Sequence
  epitope within human TNFR2 to which antagonistic antibodies or fragments thereof bind
  VARIANT (3)...(3): Xaa is Cys residue protected with ACM protecting group
  VARIANT (19)...(19): Xaa is Cys residue protected with ACM protecting group
  VARIANT (25)...(25): Xaa is Cys residue protected with ACM protecting group
LSXGSRCSSDQGGSGGCTXRPGWYXAL

SEQ ID NO: 1291 - protein, 27 aa, Artificial Sequence
  epitope within human TNFR2 to which antagonistic antibodies or fragments thereof bind
  VARIANT (23)...(23): Xaa is Cys residue protected with ACM protecting group
RCSSDQVETQAGGSGGQNRICTXRPGW

SEQ ID NO: 1292 - protein, 27 aa, Artificial Sequence
  epitope within human TNFR2 to which antagonistic antibodies or fragments thereof bind
  VARIANT (9)...(9): Xaa is Cys residue protected with ACM protecting group
  VARIANT (17)...(17): Xaa is Cys residue protected with ACM protecting group
SKQEGCRLXAPGGSGGXAPLRKCRPGF

SEQ ID NO: 1293 - protein, 27 aa, Artificial Sequence
  epitope within human TNFR2 to which antagonistic antibodies or fragments thereof bind
  VARIANT (1)...(1): Xaa is Cys residue protected with ACM protecting group
  VARIANT (23)...(23): Xaa is Cys residue protected with ACM protecting group
XGSRCSSDQVEGGSGGQNRICTXRPGW

SEQ ID NO: 1294 - protein, 27 aa, Artificial Sequence
  epitope within human TNFR2 to which antagonistic antibodies or fragments thereof bind
  VARIANT (11)...(11): Xaa is Cys residue protected with ACM protecting group
  VARIANT (23)...(23): Xaa is Cys residue protected with ACM protecting group
CSSDQVETQAXGGSGGQNRICTXRPGW

SEQ ID NO: 1295 - protein, 27 aa, Artificial Sequence
  epitope within human TNFR2 to which antagonistic antibodies or fragments thereof bind
  VARIANT (11)...(11): Xaa is Cys residue protected with ACM protecting group
  VARIANT (23)...(23): Xaa is Cys residue protected with ACM protecting group
CSSDQVETQAXGGSGGQNRICTXRPGW

SEQ ID NO: 1296 - protein, 27 aa, Artificial Sequence
  epitope within human TNFR2 to which antagonistic antibodies or fragments thereof bind
  VARIANT (4)...(4): Xaa is Cys residue protected with ACM protecting group
  VARIANT (7)...(7): Xaa is Cys residue protected with ACM protecting group
  VARIANT (19)...(19): Xaa is Cys residue protected with ACM protecting group
  VARIANT (25)...(25): Xaa is Cys residue protected with ACM protecting group
VPEXLSXGSRCGGSGGCTXRPGWYXAL

SEQ ID NO: 1297 - protein, 27 aa, Artificial Sequence
  epitope within human TNFR2 to which antagonistic antibodies or fragments thereof bind
  VARIANT (2)...(2): Xaa is Cys residue protected with ACM protecting group
  VARIANT (5)...(5): Xaa is Cys residue protected with ACM protecting group
  VARIANT (23)...(23): Xaa is Cys residue protected with ACM protecting group
EXLSXGSRCSSGGSGGQNRICTXRPGW

SEQ ID NO: 1298 - protein, 27 aa, Artificial Sequence
  epitope within human TNFR2 to which antagonistic antibodies or fragments thereof bind
  VARIANT (22)...(22): Xaa is Cys residue protected with ACM protecting group
SRCSSDQVETQGGSGGNRICTXRPGWY

SEQ ID NO: 1299 - protein, 27 aa, Artificial Sequence
  epitope within human TNFR2 to which antagonistic antibodies or fragments thereof bind
  VARIANT (1)...(1): Xaa is Cys residue protected with ACM protecting group
  VARIANT (19)...(19): Xaa is Cys residue protected with ACM protecting group
  VARIANT (25)...(25): Xaa is Cys residue protected with ACM protecting group
XGSRCSSDQVEGGSGGCTXRPGWYXAL

SEQ ID NO: 1300 - protein, 27 aa, Artificial Sequence
  epitope within human TNFR2 to which antagonistic antibodies or fragments thereof bind
  VARIANT (4)...(4): Xaa is Cys residue protected with ACM protecting group
  VARIANT (7)...(7): Xaa is Cys residue protected with ACM protecting group
  VARIANT (21)...(21): Xaa is Cys residue protected with ACM protecting group
  VARIANT (27)...(27): Xaa is Cys residue protected with ACM protecting group
VPEXLSXGSRCGGSGGRICTXRPGWYX

SEQ ID NO: 1301 - protein, 27 aa, Artificial Sequence
  epitope within human TNFR2 to which antagonistic antibodies or fragments thereof bind
  VARIANT (2)...(2): Xaa is Cys residue protected with ACM protecting group
  VARIANT (5)...(5): Xaa is Cys residue protected with ACM protecting group
  VARIANT (21)...(21): Xaa is Cys residue protected with ACM protecting group
  VARIANT (27)...(27): Xaa is Cys residue protected with ACM protecting group
EXLSXGSRCSSGGSGGRICTXRPGWYX

SEQ ID NO: 1302 - protein, 27 aa, Artificial Sequence
  epitope within human TNFR2 to which antagonistic antibodies or fragments thereof bind
  VARIANT (10)...(10): Xaa is Cys residue protected with ACM protecting group
LSKQEGCRLXAGGSGGRKCRPGFGVAR

SEQ ID NO: 1303 - protein, 27 aa, Artificial Sequence
  epitope within human TNFR2 to which antagonistic antibodies or fragments thereof bind
  VARIANT (23)...(23): Xaa is Cys residue protected with ACM protecting group
GSRCSSDQVETGGSGGQNRICTXRPGW

SEQ ID NO: 1304 - protein, 27 aa, Artificial Sequence
  epitope within human TNFR2 to which antagonistic antibodies or fragments thereof bind
  VARIANT (2)...(2): Xaa is Cys residue protected with ACM protecting group
  VARIANT (21)...(21): Xaa is Cys residue protected with ACM protecting group
  VARIANT (27)...(27): Xaa is Cys residue protected with ACM protecting group
SXGSRCSSDQVGGSGGRICTXRPGWYX

SEQ ID NO: 1305 - protein, 27 aa, Artificial Sequence
  epitope within human TNFR2 to which antagonistic antibodies or fragments thereof bind
  VARIANT (19)...(19): Xaa is Cys residue protected with ACM protecting group
  VARIANT (25)...(25): Xaa is Cys residue protected with ACM protecting group
GSRCSSDQVETGGSGGCTXRPGWYXAL

SEQ ID NO: 1306 - protein, 27 aa, Artificial Sequence
  epitope within human TNFR2 to which antagonistic antibodies or fragments thereof bind
  VARIANT (2)...(2): Xaa is Cys residue protected with ACM protecting group
YXALSKQEGCRGGSGGRKCRPGFGVAR

SEQ ID NO: 1307 - protein, 27 aa, Artificial Sequence
  epitope within human TNFR2 to which antagonistic antibodies or fragments thereof bind
  VARIANT (8)...(8): Xaa is Cys residue protected with ACM protecting group
KQEGCRLXAPLGGSGGPLRKCRPGFGV

SEQ ID NO: 1308 - protein, 27 aa, Artificial Sequence
  epitope within human TNFR2 to which antagonistic antibodies or fragments thereof bind
  VARIANT (11)...(11): Xaa is Cys residue protected with ACM protecting group
ALSKQEGCRLXGGSGGRKCRPGFGVAR

SEQ ID NO: 1309 - protein, 27 aa, Artificial Sequence
  epitope within human TNFR2 to which antagonistic antibodies or fragments thereof bind
  VARIANT (2)...(2): Xaa is Cys residue protected with ACM protecting group
  VARIANT (5)...(5): Xaa is Cys residue protected with ACM protecting group
  VARIANT (20)...(20): Xaa is Cys residue protected with ACM protecting group
  VARIANT (26)...(26): Xaa is Cys residue protected with ACM protecting group
EXLSXGSRCSSGGSGGICTXRPGWYXA

SEQ ID NO: 1310 - protein, 27 aa, Artificial Sequence
  epitope within human TNFR2 to which antagonistic antibodies or fragments thereof bind
  VARIANT (11)...(11): Xaa is Cys residue protected with ACM protecting group
  VARIANT (20)...(20): Xaa is Cys residue protected with ACM protecting group
  VARIANT (26)...(26): Xaa is Cys residue protected with ACM protecting group
CSSDQVETQAXGGSGGICTXRPGWYXA

SEQ ID NO: 1311 - protein, 27 aa, Artificial Sequence
  epitope within human TNFR2 to which antagonistic antibodies or fragments thereof bind
  VARIANT (6)...(6): Xaa is Cys residue protected with ACM protecting group
EGCRLXAPLRKGGSGGPLRKCRPGFGV

SEQ ID NO: 1312 - protein, 27 aa, Artificial Sequence
  epitope within human TNFR2 to which antagonistic antibodies or fragments thereof bind
  VARIANT (11)...(11): Xaa is Cys residue protected with ACM protecting group
ALSKQEGCRLXGGSGGPLRKCRPGFGV

SEQ ID NO: 1313 - protein, 27 aa, Artificial Sequence
  epitope within human TNFR2 to which antagonistic antibodies or fragments thereof bind
  VARIANT (1)...(1): Xaa is Cys residue protected with ACM protecting group
XALSKQEGCRLGGSGGRKCRPGFGVAR

SEQ ID NO: 1314 - protein, 27 aa, Artificial Sequence
  epitope within human TNFR2 to which antagonistic antibodies or fragments thereof bind
  VARIANT (1)...(1): Xaa is Cys residue protected with ACM protecting group
  VARIANT (17)...(17): Xaa is Cys residue protected with ACM protecting group
XALSKQEGCRLGGSGGXAPLRKCRPGF

SEQ ID NO: 1315 - protein, 27 aa, Artificial Sequence
  epitope within human TNFR2 to which antagonistic antibodies or fragments thereof bind
  VARIANT (1)...(1): Xaa is Cys residue protected with ACM protecting group
  VARIANT (4)...(4): Xaa is Cys residue protected with ACM protecting group
  VARIANT (21)...(21): Xaa is Cys residue protected with ACM protecting group
  VARIANT (27)...(27): Xaa is Cys residue protected with ACM protecting group
XLSXGSRCSSDGGSGGRICTXRPGWYX

SEQ ID NO: 1316 - protein, 27 aa, Artificial Sequence
  epitope within human TNFR2 to which antagonistic antibodies or fragments thereof bind
  VARIANT (10)...(10): Xaa is Cys residue protected with ACM protecting group
LSKQEGCRLXAGGSGGPLRKCRPGFGV

SEQ ID NO: 1317 - protein, 27 aa, Artificial Sequence
  epitope within human TNFR2 to which antagonistic antibodies or fragments thereof bind
  VARIANT (9)...(9): Xaa is Cys residue protected with ACM protecting group
SKQEGCRLXAPGGSGGRKCRPGFGVAR

SEQ ID NO: 1318 - protein, 27 aa, Artificial Sequence
  epitope within human TNFR2 to which antagonistic antibodies or fragments thereof bind
  VARIANT (8)...(8): Xaa is Cys residue protected with ACM protecting group
KQEGCRLXAPLGGSGGRKCRPGFGVAR

SEQ ID NO: 1319 - protein, 27 aa, Artificial Sequence
  epitope within human TNFR2 to which antagonistic antibodies or fragments thereof bind
  VARIANT (7)...(7): Xaa is Cys residue protected with ACM protecting group
QEGCRLXAPLRGGSGGRKCRPGFGVAR

SEQ ID NO: 1320 - protein, 27 aa, Artificial Sequence
  epitope within human TNFR2 to which antagonistic antibodies or fragments thereof bind
  VARIANT (1)...(1): Xaa is Cys residue protected with ACM protecting group
XALSKQEGCRLGGSGGAPLRKCRPGFG

SEQ ID NO: 1321 - protein, 27 aa, Artificial Sequence
  epitope within human TNFR2 to which antagonistic antibodies or fragments thereof bind
  VARIANT (1)...(1): Xaa is Cys residue protected with ACM protecting group
XALSKQEGCRLGGSGGPLRKCRPGFGV

SEQ ID NO: 1322 - protein, 27 aa, Artificial Sequence
  epitope within human TNFR2 to which antagonistic antibodies or fragments thereof bind
  VARIANT (20)...(20): Xaa is Cys residue protected with ACM protecting group
  VARIANT (26)...(26): Xaa is Cys residue protected with ACM protecting group
GSRCSSDQVETGGSGGICTXRPGWYXA

SEQ ID NO: 1323 - protein, 27 aa, Artificial Sequence
  epitope within human TNFR2 to which antagonistic antibodies or fragments thereof bind
  VARIANT (23)...(23): Xaa is Cys residue protected with ACM protecting group
SRCSSDQVETQGGSGGQNRICTXRPGW

SEQ ID NO: 1324 - protein, 27 aa, Artificial Sequence
  epitope within human TNFR2 to which antagonistic antibodies or fragments thereof bind
  VARIANT (1)...(1): Xaa is Cys residue protected with ACM protecting group
  VARIANT (20)...(20): Xaa is Cys residue protected with ACM protecting group
  VARIANT (26)...(26): Xaa is Cys residue protected with ACM protecting group
XGSRCSSDQVEGGSGGICTXRPGWYXA

SEQ ID NO: 1325 - protein, 27 aa, Artificial Sequence
  epitope within human TNFR2 to which antagonistic antibodies or fragments thereof bind
  VARIANT (2)...(2): Xaa is Cys residue protected with ACM protecting group
  VARIANT (5)...(5): Xaa is Cys residue protected with ACM protecting group
  VARIANT (22)...(22): Xaa is Cys residue protected with ACM protecting group
EXLSXGSRCSSGGSGGNRICTXRPGWY

SEQ ID NO: 1326 - protein, 27 aa, Artificial Sequence
  epitope within human TNFR2 to which antagonistic antibodies or fragments thereof bind
  VARIANT (20)...(20): Xaa is Cys residue protected with ACM protecting group
  VARIANT (26)...(26): Xaa is Cys residue protected with ACM protecting group
SRCSSDQVETQGGSGGICTXRPGWYXA

SEQ ID NO: 1327 - protein, 27 aa, Artificial Sequence
  epitope within human TNFR2 to which antagonistic antibodies or fragments thereof bind
  VARIANT (2)...(2): Xaa is Cys residue protected with ACM protecting group
YXALSKQEGCRGGSGGPLRKCRPGFGV

SEQ ID NO: 1328 - protein, 27 aa, Artificial Sequence
  epitope within human TNFR2 to which antagonistic antibodies or fragments thereof bind
  VARIANT (20)...(20): Xaa is Cys residue protected with ACM protecting group
  VARIANT (26)...(26): Xaa is Cys residue protected with ACM protecting group
RCSSDQVETQAGGSGGICTXRPGWYXA

SEQ ID NO: 1329 - protein, 27 aa, Artificial Sequence
  epitope within human TNFR2 to which antagonistic antibodies or fragments thereof bind
  VARIANT (9)...(9): Xaa is Cys residue protected with ACM protecting group
SKQEGCRLXAPGGSGGPLRKCRPGFGV

SEQ ID NO: 1330 - protein, 27 aa, Artificial Sequence
  epitope within human TNFR2 to which antagonistic antibodies or fragments thereof bind
  VARIANT (2)...(2): Xaa is Cys residue protected with ACM protecting group
  VARIANT (23)...(23): Xaa is Cys residue protected with ACM protecting group
SXGSRCSSDQVGGSGGQNRICTXRPGW

SEQ ID NO: 1331 - protein, 27 aa, Artificial Sequence
  epitope within human TNFR2 to which antagonistic antibodies or fragments thereof bind
  VARIANT (6)...(6): Xaa is Cys residue protected with ACM protecting group
EGCRLXAPLRKGGSGGRKCRPGFGVAR

SEQ ID NO: 1332 - protein, 27 aa, Artificial Sequence
  epitope within human TNFR2 to which antagonistic antibodies or fragments thereof bind
  VARIANT (1)...(1): Xaa is Cys residue protected with ACM protecting group
  VARIANT (4)...(4): Xaa is Cys residue protected with ACM protecting group
  VARIANT (23)...(23): Xaa is Cys residue protected with ACM protecting group
XLSXGSRCSSDGGSGGQNRICTXRPGW

SEQ ID NO: 1333 - protein, 27 aa, Artificial Sequence
  epitope within human TNFR2 to which antagonistic antibodies or fragments thereof bind
  VARIANT (3)...(3): Xaa is Cys residue protected with ACM protecting group
WYXALSKQEGCGGSGGPLRKCRPGFGV

SEQ ID NO: 1334 - protein, 27 aa, Artificial Sequence
  epitope within human TNFR2 to which antagonistic antibodies or fragments thereof bind
  VARIANT (7)...(7): Xaa is Cys residue protected with ACM protecting group
QEGCRLXAPLRGGSGGAPLRKCRPGFG

SEQ ID NO: 1335 - protein, 27 aa, Artificial Sequence
  epitope within human TNFR2 to which antagonistic antibodies or fragments thereof bind
  VARIANT (3)...(3): Xaa is Cys residue protected with ACM protecting group
  VARIANT (17)...(17): Xaa is Cys residue protected with ACM protecting group
WYXALSKQEGCGGSGGXAPLRKCRPGF

SEQ ID NO: 1336 - protein, 27 aa, Artificial Sequence
  epitope within human TNFR2 to which antagonistic antibodies or fragments thereof bind
  VARIANT (11)...(11): Xaa is Cys residue protected with ACM protecting group
ALSKQEGCRLXGGSGGAPLRKCRPGFG

SEQ ID NO: 1337 - protein, 27 aa, Artificial Sequence
  epitope within human TNFR2 to which antagonistic antibodies or fragments thereof bind
  VARIANT (6)...(6): Xaa is Cys residue protected with ACM protecting group
EGCRLXAPLRKGGSGGAPLRKCRPGFG

SEQ ID NO: 1338 - protein, 27 aa, Artificial Sequence
  epitope within human TNFR2 to which antagonistic antibodies or fragments thereof bind
  VARIANT (2)...(2): Xaa is Cys residue protected with ACM protecting group
  VARIANT (17)...(17): Xaa is Cys residue protected with ACM protecting group
YXALSKQEGCRGGSGGXAPLRKCRPGF

SEQ ID NO: 1339 - protein, 27 aa, Artificial Sequence
  epitope within human TNFR2 to which antagonistic antibodies or fragments thereof bind
  VARIANT (3)...(3): Xaa is Cys residue protected with ACM protecting group
  VARIANT (23)...(23): Xaa is Cys residue protected with ACM protecting group
LSXGSRCSSDQGGSGGQNRICTXRPGW

SEQ ID NO: 1340 - protein, 27 aa, Artificial Sequence
  epitope within human TNFR2 to which antagonistic antibodies or fragments thereof bind
  VARIANT (10)...(10): Xaa is Cys residue protected with ACM protecting group
LSKQEGCRLXAGGSGGAPLRKCRPGFG

SEQ ID NO: 1341 - protein, 27 aa, Artificial Sequence
  epitope within human TNFR2 to which antagonistic antibodies or fragments thereof bind
  VARIANT (22)...(22): Xaa is Cys residue protected with ACM protecting group
RCSSDQVETQAGGSGGNRICTXRPGWY

SEQ ID NO: 1342 - protein, 27 aa, Artificial Sequence
  epitope within human TNFR2 to which antagonistic antibodies or fragments thereof bind
  VARIANT (8)...(8): Xaa is Cys residue protected with ACM protecting group
KQEGCRLXAPLGGSGGAPLRKCRPGFG

SEQ ID NO: 1343 - protein, 27 aa, Artificial Sequence
  epitope within human TNFR2 to which antagonistic antibodies or fragments thereof bind
  VARIANT (9)...(9): Xaa is Cys residue protected with ACM protecting group
SKQEGCRLXAPGGSGGAPLRKCRPGFG

SEQ ID NO: 1344 - protein, 27 aa, Artificial Sequence
  epitope within human TNFR2 to which antagonistic antibodies or fragments thereof bind
  VARIANT (26)...(26): Xaa is Cys residue protected with ACM protecting group
SRCSSDQVETQGGSGGTREQNRICTXR

SEQ ID NO: 1345 - protein, 27 aa, Artificial Sequence
  epitope within human TNFR2 to which antagonistic antibodies or fragments thereof bind
  VARIANT (26)...(26): Xaa is Cys residue protected with ACM protecting group
RCSSDQVETQAGGSGGTREQNRICTXR

SEQ ID NO: 1346 - protein, 27 aa, Artificial Sequence
  epitope within human TNFR2 to which antagonistic antibodies or fragments thereof bind
  VARIANT (11)...(11): Xaa is Cys residue protected with ACM protecting group
  VARIANT (26)...(26): Xaa is Cys residue protected with ACM protecting group
CSSDQVETQAXGGSGGTREQNRICTXR

SEQ ID NO: 1347 - protein, 27 aa, Artificial Sequence
  epitope within human TNFR2 to which antagonistic antibodies or fragments thereof bind
  VARIANT (4)...(4): Xaa is Cys residue protected with ACM protecting group
  VARIANT (7)...(7): Xaa is Cys residue protected with ACM protecting group
  VARIANT (25)...(25): Xaa is Cys residue protected with ACM protecting group
VPEXLSXGSRCGGSGGREQNRICTXRP

SEQ ID NO: 1348 - protein, 27 aa, Artificial Sequence
  epitope within human TNFR2 to which antagonistic antibodies or fragments thereof bind
  VARIANT (3)...(3): Xaa is Cys residue protected with ACM protecting group
  VARIANT (6)...(6): Xaa is Cys residue protected with ACM protecting group
  VARIANT (25)...(25): Xaa is Cys residue protected with ACM protecting group
PEXLSXGSRCSGGSGGREQNRICTXRP

SEQ ID NO: 1349 - protein, 27 aa, Artificial Sequence
  epitope within human TNFR2 to which antagonistic antibodies or fragments thereof bind
  VARIANT (2)...(2): Xaa is Cys residue protected with ACM protecting group
  VARIANT (5)...(5): Xaa is Cys residue protected with ACM protecting group
  VARIANT (25)...(25): Xaa is Cys residue protected with ACM protecting group
EXLSXGSRCSSGGSGGREQNRICTXRP

SEQ ID NO: 1350 - protein, 27 aa, Artificial Sequence
  epitope within human TNFR2 to which antagonistic antibodies or fragments thereof bind
  VARIANT (1)...(1): Xaa is Cys residue protected with ACM protecting group
  VARIANT (4)...(4): Xaa is Cys residue protected with ACM protecting group
  VARIANT (25)...(25): Xaa is Cys residue protected with ACM protecting group
XLSXGSRCSSDGGSGGREQNRICTXRP

SEQ ID NO: 1351 - protein, 27 aa, Artificial Sequence
  epitope within human TNFR2 to which antagonistic antibodies or fragments thereof bind
  VARIANT (3)...(3): Xaa is Cys residue protected with ACM protecting group
  VARIANT (25)...(25): Xaa is Cys residue protected with ACM protecting group
LSXGSRCSSDQGGSGGREQNRICTXRP

SEQ ID NO: 1352 - protein, 27 aa, Artificial Sequence
  epitope within human TNFR2 to which antagonistic antibodies or fragments thereof bind
  VARIANT (2)...(2): Xaa is Cys residue protected with ACM protecting group
  VARIANT (25)...(25): Xaa is Cys residue protected with ACM protecting group
SXGSRCSSDQVGGSGGREQNRICTXRP

SEQ ID NO: 1353 - protein, 27 aa, Artificial Sequence
  epitope within human TNFR2 to which antagonistic antibodies or fragments thereof bind
  VARIANT (1)...(1): Xaa is Cys residue protected with ACM protecting group
  VARIANT (25)...(25): Xaa is Cys residue protected with ACM protecting group
XGSRCSSDQVEGGSGGREQNRICTXRP

SEQ ID NO: 1354 - protein, 27 aa, Artificial Sequence
  epitope within human TNFR2 to which antagonistic antibodies or fragments thereof bind
  VARIANT (25)...(25): Xaa is Cys residue protected with ACM protecting group
GSRCSSDQVETGGSGGREQNRICTXRP

SEQ ID NO: 1355 - protein, 27 aa, Artificial Sequence
  epitope within human TNFR2 to which antagonistic antibodies or fragments thereof bind
  VARIANT (25)...(25): Xaa is Cys residue protected with ACM protecting group
SRCSSDQVETQGGSGGREQNRICTXRP

SEQ ID NO: 1356 - protein, 27 aa, Artificial Sequence
  epitope within human TNFR2 to which antagonistic antibodies or fragments thereof bind
  VARIANT (25)...(25): Xaa is Cys residue protected with ACM protecting group
RCSSDQVETQAGGSGGREQNRICTXRP

SEQ ID NO: 1357 - protein, 27 aa, Artificial Sequence
  epitope within human TNFR2 to which antagonistic antibodies or fragments thereof bind
  VARIANT (11)...(11): Xaa is Cys residue protected with ACM protecting group
  VARIANT (25)...(25): Xaa is Cys residue protected with ACM protecting group
CSSDQVETQAXGGSGGREQNRICTXRP

SEQ ID NO: 1358 - protein, 27 aa, Artificial Sequence
  epitope within human TNFR2 to which antagonistic antibodies or fragments thereof bind
  VARIANT (4)...(4): Xaa is Cys residue protected with ACM protecting group
  VARIANT (7)...(7): Xaa is Cys residue protected with ACM protecting group
  VARIANT (24)...(24): Xaa is Cys residue protected with ACM protecting group
VPEXLSXGSRCGGSGGEQNRICTXRPG

SEQ ID NO: 1359 - protein, 27 aa, Artificial Sequence
  epitope within human TNFR2 to which antagonistic antibodies or fragments thereof bind
  VARIANT (3)...(3): Xaa is Cys residue protected with ACM protecting group
  VARIANT (6)...(6): Xaa is Cys residue protected with ACM protecting group
  VARIANT (24)...(24): Xaa is Cys residue protected with ACM protecting group
PEXLSXGSRCSGGSGGEQNRICTXRPG

SEQ ID NO: 1360 - protein, 27 aa, Artificial Sequence
  epitope within human TNFR2 to which antagonistic antibodies or fragments thereof bind
  VARIANT (2)...(2): Xaa is Cys residue protected with ACM protecting group
  VARIANT (5)...(5): Xaa is Cys residue protected with ACM protecting group
  VARIANT (24)...(24): Xaa is Cys residue protected with ACM protecting group
EXLSXGSRCSSGGSGGEQNRICTXRPG

SEQ ID NO: 1361 - protein, 27 aa, Artificial Sequence
  epitope within human TNFR2 to which antagonistic antibodies or fragments thereof bind
  VARIANT (1)...(1): Xaa is Cys residue protected with ACM protecting group
  VARIANT (4)...(4): Xaa is Cys residue protected with ACM protecting group
  VARIANT (24)...(24): Xaa is Cys residue protected with ACM protecting group
XLSXGSRCSSDGGSGGEQNRICTXRPG

SEQ ID NO: 1362 - protein, 27 aa, Artificial Sequence
  epitope within human TNFR2 to which antagonistic antibodies or fragments thereof bind
  VARIANT (3)...(3): Xaa is Cys residue protected with ACM protecting group
  VARIANT (24)...(24): Xaa is Cys residue protected with ACM protecting group
LSXGSRCSSDQGGSGGEQNRICTXRPG

SEQ ID NO: 1363 - protein, 27 aa, Artificial Sequence
  epitope within human TNFR2 to which antagonistic antibodies or fragments thereof bind
  VARIANT (2)...(2): Xaa is Cys residue protected with ACM protecting group
  VARIANT (24)...(24): Xaa is Cys residue protected with ACM protecting group
SXGSRCSSDQVGGSGGEQNRICTXRPG

SEQ ID NO: 1364 - protein, 27 aa, Artificial Sequence
  epitope within human TNFR2 to which antagonistic antibodies or fragments thereof bind
  VARIANT (1)...(1): Xaa is Cys residue protected with ACM protecting group
  VARIANT (24)...(24): Xaa is Cys residue protected with ACM protecting group
XGSRCSSDQVEGGSGGEQNRICTXRPG

SEQ ID NO: 1365 - protein, 27 aa, Artificial Sequence
  epitope within human TNFR2 to which antagonistic antibodies or fragments thereof bind
  VARIANT (24)...(24): Xaa is Cys residue protected with ACM protecting group
GSRCSSDQVETGGSGGEQNRICTXRPG

SEQ ID NO: 1366 - protein, 27 aa, Artificial Sequence
  epitope within human TNFR2 to which antagonistic antibodies or fragments thereof bind
  VARIANT (24)...(24): Xaa is Cys residue protected with ACM protecting group
SRCSSDQVETQGGSGGEQNRICTXRPG

SEQ ID NO: 1367 - protein, 27 aa, Artificial Sequence
  epitope within human TNFR2 to which antagonistic antibodies or fragments thereof bind
  VARIANT (24)...(24): Xaa is Cys residue protected with ACM protecting group
RCSSDQVETQAGGSGGEQNRICTXRPG

SEQ ID NO: 1368 - protein, 27 aa, Artificial Sequence
  epitope within human TNFR2 to which antagonistic antibodies or fragments thereof bind
  VARIANT (11)...(11): Xaa is Cys residue protected with ACM protecting group
  VARIANT (24)...(24): Xaa is Cys residue protected with ACM protecting group
CSSDQVETQAXGGSGGEQNRICTXRPG

SEQ ID NO: 1369 - protein, 27 aa, Artificial Sequence
  epitope within human TNFR2 to which antagonistic antibodies or fragments thereof bind
  VARIANT (4)...(4): Xaa is Cys residue protected with ACM protecting group
  VARIANT (7)...(7): Xaa is Cys residue protected with ACM protecting group
  VARIANT (23)...(23): Xaa is Cys residue protected with ACM protecting group
VPEXLSXGSRCGGSGGQNRICTXRPGW

SEQ ID NO: 1370 - protein, 27 aa, Artificial Sequence
  epitope within human TNFR2 to which antagonistic antibodies or fragments thereof bind
  VARIANT (3)...(3): Xaa is Cys residue protected with ACM protecting group
  VARIANT (6)...(6): Xaa is Cys residue protected with ACM protecting group
  VARIANT (23)...(23): Xaa is Cys residue protected with ACM protecting group
PEXLSXGSRCSGGSGGQNRICTXRPGW

SEQ ID NO: 1371 - protein, 27 aa, Artificial Sequence
  epitope within human TNFR2 to which antagonistic antibodies or fragments thereof bind
  VARIANT (2)...(2): Xaa is Cys residue protected with ACM protecting group
  VARIANT (5)...(5): Xaa is Cys residue protected with ACM protecting group
  VARIANT (23)...(23): Xaa is Cys residue protected with ACM protecting group
EXLSXGSRCSSGGSGGQNRICTXRPGW

SEQ ID NO: 1372 - protein, 27 aa, Artificial Sequence
  epitope within human TNFR2 to which antagonistic antibodies or fragments thereof bind
  VARIANT (1)...(1): Xaa is Cys residue protected with ACM protecting group
  VARIANT (4)...(4): Xaa is Cys residue protected with ACM protecting group
  VARIANT (23)...(23): Xaa is Cys residue protected with ACM protecting group
XLSXGSRCSSDGGSGGQNRICTXRPGW

SEQ ID NO: 1373 - protein, 27 aa, Artificial Sequence
  epitope within human TNFR2 to which antagonistic antibodies or fragments thereof bind
  VARIANT (3)...(3): Xaa is Cys residue protected with ACM protecting group
  VARIANT (23)...(23): Xaa is Cys residue protected with ACM protecting group
LSXGSRCSSDQGGSGGQNRICTXRPGW

SEQ ID NO: 1374 - protein, 27 aa, Artificial Sequence
  epitope within human TNFR2 to which antagonistic antibodies or fragments thereof bind
  VARIANT (2)...(2): Xaa is Cys residue protected with ACM protecting group
  VARIANT (23)...(23): Xaa is Cys residue protected with ACM protecting group
SXGSRCSSDQVGGSGGQNRICTXRPGW

SEQ ID NO: 1375 - protein, 27 aa, Artificial Sequence
  epitope within human TNFR2 to which antagonistic antibodies or fragments thereof bind
  VARIANT (1)...(1): Xaa is Cys residue protected with ACM protecting group
  VARIANT (23)...(23): Xaa is Cys residue protected with ACM protecting group
XGSRCSSDQVEGGSGGQNRICTXRPGW

SEQ ID NO: 1376 - protein, 27 aa, Artificial Sequence
  epitope within human TNFR2 to which antagonistic antibodies or fragments thereof bind
  VARIANT (23)...(23): Xaa is Cys residue protected with ACM protecting group
GSRCSSDQVETGGSGGQNRICTXRPGW

SEQ ID NO: 1377 - protein, 27 aa, Artificial Sequence
  epitope within human TNFR2 to which antagonistic antibodies or fragments thereof bind
  VARIANT (23)...(23): Xaa is Cys residue protected with ACM protecting group
SRCSSDQVETQGGSGGQNRICTXRPGW

SEQ ID NO: 1378 - protein, 27 aa, Artificial Sequence
  epitope within human TNFR2 to which antagonistic antibodies or fragments thereof bind
  VARIANT (23)...(23): Xaa is Cys residue protected with ACM protecting group
RCSSDQVETQAGGSGGQNRICTXRPGW

SEQ ID NO: 1379 - protein, 27 aa, Artificial Sequence
  epitope within human TNFR2 to which antagonistic antibodies or fragments thereof bind
  VARIANT (11)...(11): Xaa is Cys residue protected with ACM protecting group
  VARIANT (23)...(23): Xaa is Cys residue protected with ACM protecting group
CSSDQVETQAXGGSGGQNRICTXRPGW

SEQ ID NO: 1380 - protein, 27 aa, Artificial Sequence
  epitope within human TNFR2 to which antagonistic antibodies or fragments thereof bind
  VARIANT (4)...(4): Xaa is Cys residue protected with ACM protecting group
  VARIANT (7)...(7): Xaa is Cys residue protected with ACM protecting group
  VARIANT (22)...(22): Xaa is Cys residue protected with ACM protecting group
VPEXLSXGSRCGGSGGNRICTXRPGWY

SEQ ID NO: 1381 - protein, 27 aa, Artificial Sequence
  epitope within human TNFR2 to which antagonistic antibodies or fragments thereof bind
  VARIANT (3)...(3): Xaa is Cys residue protected with ACM protecting group
  VARIANT (6)...(6): Xaa is Cys residue protected with ACM protecting group
  VARIANT (22)...(22): Xaa is Cys residue protected with ACM protecting group
PEXLSXGSRCSGGSGGNRICTXRPGWY

SEQ ID NO: 1382 - protein, 27 aa, Artificial Sequence
  epitope within human TNFR2 to which antagonistic antibodies or fragments thereof bind
  VARIANT (2)...(2): Xaa is Cys residue protected with ACM protecting group
  VARIANT (5)...(5): Xaa is Cys residue protected with ACM protecting group
  VARIANT (22)...(22): Xaa is Cys residue protected with ACM protecting group
EXLSXGSRCSSGGSGGNRICTXRPGWY

SEQ ID NO: 1383 - protein, 27 aa, Artificial Sequence
  epitope within human TNFR2 to which antagonistic antibodies or fragments thereof bind
  VARIANT (1)...(1): Xaa is Cys residue protected with ACM protecting group
  VARIANT (4)...(4): Xaa is Cys residue protected with ACM protecting group
  VARIANT (22)...(22): Xaa is Cys residue protected with ACM protecting group
XLSXGSRCSSDGGSGGNRICTXRPGWY

SEQ ID NO: 1384 - protein, 27 aa, Artificial Sequence
  epitope within human TNFR2 to which antagonistic antibodies or fragments thereof bind
  VARIANT (3)...(3): Xaa is Cys residue protected with ACM protecting group
  VARIANT (22)...(22): Xaa is Cys residue protected with ACM protecting group
LSXGSRCSSDQGGSGGNRICTXRPGWY

SEQ ID NO: 1385 - protein, 27 aa, Artificial Sequence
  epitope within human TNFR2 to which antagonistic antibodies or fragments thereof bind
  VARIANT (2)...(2): Xaa is Cys residue protected with ACM protecting group
  VARIANT (22)...(22): Xaa is Cys residue protected with ACM protecting group
SXGSRCSSDQVGGSGGNRICTXRPGWY

SEQ ID NO: 1386 - protein, 27 aa, Artificial Sequence
  epitope within human TNFR2 to which antagonistic antibodies or fragments thereof bind
  VARIANT (1)...(1): Xaa is Cys residue protected with ACM protecting group
  VARIANT (22)...(22): Xaa is Cys residue protected with ACM protecting group
XGSRCSSDQVEGGSGGNRICTXRPGWY

SEQ ID NO: 1387 - protein, 27 aa, Artificial Sequence
  epitope within human TNFR2 to which antagonistic antibodies or fragments thereof bind
  VARIANT (22)...(22): Xaa is Cys residue protected with ACM protecting group
GSRCSSDQVETGGSGGNRICTXRPGWY

SEQ ID NO: 1388 - protein, 27 aa, Artificial Sequence
  epitope within human TNFR2 to which antagonistic antibodies or fragments thereof bind
  VARIANT (22)...(22): Xaa is Cys residue protected with ACM protecting group
SRCSSDQVETQGGSGGNRICTXRPGWY

SEQ ID NO: 1389 - protein, 27 aa, Artificial Sequence
  epitope within human TNFR2 to which antagonistic antibodies or fragments thereof bind
  VARIANT (22)...(22): Xaa is Cys residue protected with ACM protecting group
RCSSDQVETQAGGSGGNRICTXRPGWY

SEQ ID NO: 1390 - protein, 27 aa, Artificial Sequence
  epitope within human TNFR2 to which antagonistic antibodies or fragments thereof bind
  VARIANT (11)...(11): Xaa is Cys residue protected with ACM protecting group
  VARIANT (22)...(22): Xaa is Cys residue protected with ACM protecting group
CSSDQVETQAXGGSGGNRICTXRPGWY

SEQ ID NO: 1391 - protein, 27 aa, Artificial Sequence
  epitope within human TNFR2 to which antagonistic antibodies or fragments thereof bind
  VARIANT (4)...(4): Xaa is Cys residue protected with ACM protecting group
  VARIANT (7)...(7): Xaa is Cys residue protected with ACM protecting group
  VARIANT (21)...(21): Xaa is Cys residue protected with ACM protecting group
  VARIANT (27)...(27): Xaa is Cys residue protected with ACM protecting group
VPEXLSXGSRCGGSGGRICTXRPGWYX

SEQ ID NO: 1392 - protein, 27 aa, Artificial Sequence
  epitope within human TNFR2 to which antagonistic antibodies or fragments thereof bind
  VARIANT (3)...(3): Xaa is Cys residue protected with ACM protecting group
  VARIANT (6)...(6): Xaa is Cys residue protected with ACM protecting group
  VARIANT (21)...(21): Xaa is Cys residue protected with ACM protecting group
  VARIANT (27)...(27): Xaa is Cys residue protected with ACM protecting group
PEXLSXGSRCSGGSGGRICTXRPGWYX

SEQ ID NO: 1393 - protein, 27 aa, Artificial Sequence
  epitope within human TNFR2 to which antagonistic antibodies or fragments thereof bind
  VARIANT (2)...(2): Xaa is Cys residue protected with ACM protecting group
  VARIANT (5)...(5): Xaa is Cys residue protected with ACM protecting group
  VARIANT (21)...(21): Xaa is Cys residue protected with ACM protecting group
  VARIANT (27)...(27): Xaa is Cys residue protected with ACM protecting group
EXLSXGSRCSSGGSGGRICTXRPGWYX

SEQ ID NO: 1394 - protein, 27 aa, Artificial Sequence
  epitope within human TNFR2 to which antagonistic antibodies or fragments thereof bind
  VARIANT (1)...(1): Xaa is Cys residue protected with ACM protecting group
  VARIANT (4)...(4): Xaa is Cys residue protected with ACM protecting group
  VARIANT (21)...(21): Xaa is Cys residue protected with ACM protecting group
  VARIANT (27)...(27): Xaa is Cys residue protected with ACM protecting group
XLSXGSRCSSDGGSGGRICTXRPGWYX

SEQ ID NO: 1395 - protein, 27 aa, Artificial Sequence
  epitope within human TNFR2 to which antagonistic antibodies or fragments thereof bind
  VARIANT (3)...(3): Xaa is Cys residue protected with ACM protecting group
  VARIANT (21)...(21): Xaa is Cys residue protected with ACM protecting group
  VARIANT (27)...(27): Xaa is Cys residue protected with ACM protecting group
LSXGSRCSSDQGGSGGRICTXRPGWYX

SEQ ID NO: 1396 - protein, 27 aa, Artificial Sequence
  epitope within human TNFR2 to which antagonistic antibodies or fragments thereof bind
  VARIANT (2)...(2): Xaa is Cys residue protected with ACM protecting group
  VARIANT (21)...(21): Xaa is Cys residue protected with ACM protecting group
  VARIANT (27)...(27): Xaa is Cys residue protected with ACM protecting group
SXGSRCSSDQVGGSGGRICTXRPGWYX

SEQ ID NO: 1397 - protein, 27 aa, Artificial Sequence
  epitope within human TNFR2 to which antagonistic antibodies or fragments thereof bind
  VARIANT (1)...(1): Xaa is Cys residue protected with ACM protecting group
  VARIANT (21)...(21): Xaa is Cys residue protected with ACM protecting group
  VARIANT (27)...(27): Xaa is Cys residue protected with ACM protecting group
XGSRCSSDQVEGGSGGRICTXRPGWYX

SEQ ID NO: 1398 - protein, 27 aa, Artificial Sequence
  epitope within human TNFR2 to which antagonistic antibodies or fragments thereof bind
  VARIANT (21)...(21): Xaa is Cys residue protected with ACM protecting group
  VARIANT (27)...(27): Xaa is Cys residue protected with ACM protecting group
GSRCSSDQVETGGSGGRICTXRPGWYX

SEQ ID NO: 1399 - protein, 27 aa, Artificial Sequence
  epitope within human TNFR2 to which antagonistic antibodies or fragments thereof bind
  VARIANT (21)...(21): Xaa is Cys residue protected with ACM protecting group
  VARIANT (27)...(27): Xaa is Cys residue protected with ACM protecting group
SRCSSDQVETQGGSGGRICTXRPGWYX

SEQ ID NO: 1400 - protein, 27 aa, Artificial Sequence
  epitope within human TNFR2 to which antagonistic antibodies or fragments thereof bind
  VARIANT (21)...(21): Xaa is Cys residue protected with ACM protecting group
  VARIANT (27)...(27): Xaa is Cys residue protected with ACM protecting group
RCSSDQVETQAGGSGGRICTXRPGWYX

SEQ ID NO: 1401 - protein, 27 aa, Artificial Sequence
  epitope within human TNFR2 to which antagonistic antibodies or fragments thereof bind
  VARIANT (11)...(11): Xaa is Cys residue protected with ACM protecting group
  VARIANT (21)...(21): Xaa is Cys residue protected with ACM protecting group
  VARIANT (27)...(27): Xaa is Cys residue protected with ACM protecting group
CSSDQVETQAXGGSGGRICTXRPGWYX

SEQ ID NO: 1402 - protein, 27 aa, Artificial Sequence
  epitope within human TNFR2 to which antagonistic antibodies or fragments thereof bind
  VARIANT (4)...(4): Xaa is Cys residue protected with ACM protecting group
  VARIANT (7)...(7): Xaa is Cys residue protected with ACM protecting group
  VARIANT (20)...(20): Xaa is Cys residue protected with ACM protecting group
  VARIANT (26)...(26): Xaa is Cys residue protected with ACM protecting group
VPEXLSXGSRCGGSGGICTXRPGWYXA

SEQ ID NO: 1403 - protein, 27 aa, Artificial Sequence
  epitope within human TNFR2 to which antagonistic antibodies or fragments thereof bind
  VARIANT (3)...(3): Xaa is Cys residue protected with ACM protecting group
  VARIANT (6)...(6): Xaa is Cys residue protected with ACM protecting group
  VARIANT (20)...(20): Xaa is Cys residue protected with ACM protecting group
  VARIANT (26)...(26): Xaa is Cys residue protected with ACM protecting group
PEXLSXGSRCSGGSGGICTXRPGWYXA

SEQ ID NO: 1404 - protein, 27 aa, Artificial Sequence
  epitope within human TNFR2 to which antagonistic antibodies or fragments thereof bind
  VARIANT (2)...(2): Xaa is Cys residue protected with ACM protecting group
  VARIANT (5)...(5): Xaa is Cys residue protected with ACM protecting group
  VARIANT (20)...(20): Xaa is Cys residue protected with ACM protecting group
  VARIANT (26)...(26): Xaa is Cys residue protected with ACM protecting group
EXLSXGSRCSSGGSGGICTXRPGWYXA

SEQ ID NO: 1405 - protein, 27 aa, Artificial Sequence
  epitope within human TNFR2 to which antagonistic antibodies or fragments thereof bind
  VARIANT (1)...(1): Xaa is Cys residue protected with ACM protecting group
  VARIANT (20)...(20): Xaa is Cys residue protected with ACM protecting group
  VARIANT (26)...(26): Xaa is Cys residue protected with ACM protecting group
XGSRCSSDQVEGGSGGICTXRPGWYXA

SEQ ID NO: 1406 - protein, 27 aa, Artificial Sequence
  epitope within human TNFR2 to which antagonistic antibodies or fragments thereof bind
  VARIANT (20)...(20): Xaa is Cys residue protected with ACM protecting group
  VARIANT (26)...(26): Xaa is Cys residue protected with ACM protecting group
GSRCSSDQVETGGSGGICTXRPGWYXA

SEQ ID NO: 1407 - protein, 27 aa, Artificial Sequence
  epitope within human TNFR2 to which antagonistic antibodies or fragments thereof bind
  VARIANT (20)...(20): Xaa is Cys residue protected with ACM protecting group
  VARIANT (26)...(26): Xaa is Cys residue protected with ACM protecting group
SRCSSDQVETQGGSGGICTXRPGWYXA

SEQ ID NO: 1408 - protein, 27 aa, Artificial Sequence
  epitope within human TNFR2 to which antagonistic antibodies or fragments thereof bind
  VARIANT (20)...(20): Xaa is Cys residue protected with ACM protecting group
  VARIANT (26)...(26): Xaa is Cys residue protected with ACM protecting group
RCSSDQVETQAGGSGGICTXRPGWYXA

SEQ ID NO: 1409 - protein, 27 aa, Artificial Sequence
  epitope within human TNFR2 to which antagonistic antibodies or fragments thereof bind
  VARIANT (11)...(11): Xaa is Cys residue protected with ACM protecting group
  VARIANT (20)...(20): Xaa is Cys residue protected with ACM protecting group
  VARIANT (26)...(26): Xaa is Cys residue protected with ACM protecting group
CSSDQVETQAXGGSGGICTXRPGWYXA

SEQ ID NO: 1410 - protein, 27 aa, Artificial Sequence
  epitope within human TNFR2 to which antagonistic antibodies or fragments thereof bind
  VARIANT (4)...(4): Xaa is Cys residue protected with ACM protecting group
  VARIANT (7)...(7): Xaa is Cys residue protected with ACM protecting group
  VARIANT (19)...(19): Xaa is Cys residue protected with ACM protecting group
  VARIANT (25)...(25): Xaa is Cys residue protected with ACM protecting group
VPEXLSXGSRCGGSGGCTXRPGWYXAL

SEQ ID NO: 1411 - protein, 27 aa, Artificial Sequence
  epitope within human TNFR2 to which antagonistic antibodies or fragments thereof bind
  VARIANT (3)...(3): Xaa is Cys residue protected with ACM protecting group
  VARIANT (6)...(6): Xaa is Cys residue protected with ACM protecting group
  VARIANT (19)...(19): Xaa is Cys residue protected with ACM protecting group
  VARIANT (25)...(25): Xaa is Cys residue protected with ACM protecting group
PEXLSXGSRCSGGSGGCTXRPGWYXAL

SEQ ID NO: 1412 - protein, 27 aa, Artificial Sequence
  epitope within human TNFR2 to which antagonistic antibodies or fragments thereof bind
  VARIANT (2)...(2): Xaa is Cys residue protected with ACM protecting group
  VARIANT (5)...(5): Xaa is Cys residue protected with ACM protecting group
  VARIANT (19)...(19): Xaa is Cys residue protected with ACM protecting group
  VARIANT (25)...(25): Xaa is Cys residue protected with ACM protecting group
EXLSXGSRCSSGGSGGCTXRPGWYXAL

SEQ ID NO: 1413 - protein, 27 aa, Artificial Sequence
  epitope within human TNFR2 to which antagonistic antibodies or fragments thereof bind
  VARIANT (1)...(1): Xaa is Cys residue protected with ACM protecting group
  VARIANT (4)...(4): Xaa is Cys residue protected with ACM protecting group
  VARIANT (19)...(19): Xaa is Cys residue protected with ACM protecting group
  VARIANT (25)...(25): Xaa is Cys residue protected with ACM protecting group
XLSXGSRCSSDGGSGGCTXRPGWYXAL

SEQ ID NO: 1414 - protein, 27 aa, Artificial Sequence
  epitope within human TNFR2 to which antagonistic antibodies or fragments thereof bind
  VARIANT (3)...(3): Xaa is Cys residue protected with ACM protecting group
  VARIANT (19)...(19): Xaa is Cys residue protected with ACM protecting group
  VARIANT (25)...(25): Xaa is Cys residue protected with ACM protecting group
LSXGSRCSSDQGGSGGCTXRPGWYXAL

SEQ ID NO: 1415 - protein, 27 aa, Artificial Sequence
  epitope within human TNFR2 to which antagonistic antibodies or fragments thereof bind
  VARIANT (2)...(2): Xaa is Cys residue protected with ACM protecting group
  VARIANT (19)...(19): Xaa is Cys residue protected with ACM protecting group
  VARIANT (25)...(25): Xaa is Cys residue protected with ACM protecting group
SXGSRCSSDQVGGSGGCTXRPGWYXAL

SEQ ID NO: 1416 - protein, 27 aa, Artificial Sequence
  epitope within human TNFR2 to which antagonistic antibodies or fragments thereof bind
  VARIANT (1)...(1): Xaa is Cys residue protected with ACM protecting group
  VARIANT (19)...(19): Xaa is Cys residue protected with ACM protecting group
  VARIANT (25)...(25): Xaa is Cys residue protected with ACM protecting group
XGSRCSSDQVEGGSGGCTXRPGWYXAL

SEQ ID NO: 1417 - protein, 27 aa, Artificial Sequence
  epitope within human TNFR2 to which antagonistic antibodies or fragments thereof bind
  VARIANT (19)...(19): Xaa is Cys residue protected with ACM protecting group
  VARIANT (25)...(25): Xaa is Cys residue protected with ACM protecting group
GSRCSSDQVETGGSGGCTXRPGWYXAL

SEQ ID NO: 1418 - protein, 27 aa, Artificial Sequence
  epitope within human TNFR2 to which antagonistic antibodies or fragments thereof bind
  VARIANT (19)...(19): Xaa is Cys residue protected with ACM protecting group
  VARIANT (25)...(25): Xaa is Cys residue protected with ACM protecting group
SRCSSDQVETQGGSGGCTXRPGWYXAL

SEQ ID NO: 1419 - protein, 27 aa, Artificial Sequence
  epitope within human TNFR2 to which antagonistic antibodies or fragments thereof bind
  VARIANT (19)...(19): Xaa is Cys residue protected with ACM protecting group
  VARIANT (25)...(25): Xaa is Cys residue protected with ACM protecting group
RCSSDQVETQAGGSGGCTXRPGWYXAL

SEQ ID NO: 1420 - protein, 27 aa, Artificial Sequence
  epitope within human TNFR2 to which antagonistic antibodies or fragments thereof bind
  VARIANT (11)...(11): Xaa is Cys residue protected with ACM protecting group
  VARIANT (19)...(19): Xaa is Cys residue protected with ACM protecting group
  VARIANT (25)...(25): Xaa is Cys residue protected with ACM protecting group
CSSDQVETQAXGGSGGCTXRPGWYXAL

SEQ ID NO: 1421 - protein, 27 aa, Artificial Sequence
  epitope within human TNFR2 to which antagonistic antibodies or fragments thereof bind
  VARIANT (1)...(1): Xaa is Cys residue protected with ACM protecting group
  VARIANT (9)...(9): Xaa is Cys residue protected with ACM protecting group
XTREQNRIXTCGGSGGRPGWYCALSKQ

SEQ ID NO: 1422 - protein, 27 aa, Artificial Sequence
  epitope within human TNFR2 to which antagonistic antibodies or fragments thereof bind
  VARIANT (8)...(8): Xaa is Cys residue protected with ACM protecting group
TREQNRIXTCRGGSGGRPGWYCALSKQ

SEQ ID NO: 1423 - protein, 27 aa, Artificial Sequence
  epitope within human TNFR2 to which antagonistic antibodies or fragments thereof bind
  VARIANT (7)...(7): Xaa is Cys residue protected with ACM protecting group
REQNRIXTCRPGGSGGRPGWYCALSKQ

SEQ ID NO: 1424 - protein, 27 aa, Artificial Sequence
  epitope within human TNFR2 to which antagonistic antibodies or fragments thereof bind
  VARIANT (6)...(6): Xaa is Cys residue protected with ACM protecting group
EQNRIXTCRPGGGSGGRPGWYCALSKQ

SEQ ID NO: 1425 - protein, 27 aa, Artificial Sequence
  epitope within human TNFR2 to which antagonistic antibodies or fragments thereof bind
  VARIANT (5)...(5): Xaa is Cys residue protected with ACM protecting group
QNRIXTCRPGWGGSGGRPGWYCALSKQ

SEQ ID NO: 1426 - protein, 27 aa, Artificial Sequence
  epitope within human TNFR2 to which antagonistic antibodies or fragments thereof bind
  VARIANT (4)...(4): Xaa can be any naturally occurring amino acid
NRIXTCRPGWYGGSGGRPGWYCALSKQ

SEQ ID NO: 1427 - protein, 27 aa, Artificial Sequence
  epitope within human TNFR2 to which antagonistic antibodies or fragments thereof bind
  VARIANT (3)...(3): Xaa is Cys residue protected with ACM protecting group
  VARIANT (17)...(17): Xaa is Cys residue protected with ACM protecting group
WYXALSKQEGCGGSGGXAPLRKCRPGF

SEQ ID NO: 1428 - protein, 27 aa, Artificial Sequence
  epitope within human TNFR2 to which antagonistic antibodies or fragments thereof bind
  VARIANT (2)...(2): Xaa is Cys residue protected with ACM protecting group
  VARIANT (17)...(17): Xaa is Cys residue protected with ACM protecting group
YXALSKQEGCRGGSGGXAPLRKCRPGF

SEQ ID NO: 1429 - protein, 27 aa, Artificial Sequence
  epitope within human TNFR2 to which antagonistic antibodies or fragments thereof bind
  VARIANT (1)...(1): Xaa is Cys residue protected with ACM protecting group
  VARIANT (17)...(17): Xaa is Cys residue protected with ACM protecting group
XALSKQEGCRLGGSGGXAPLRKCRPGF

SEQ ID NO: 1430 - protein, 27 aa, Artificial Sequence
  epitope within human TNFR2 to which antagonistic antibodies or fragments thereof bind
  VARIANT (11)...(11): Xaa is Cys residue protected with ACM protecting group
  VARIANT (17)...(17): Xaa is Cys residue protected with ACM protecting group
ALSKQEGCRLXGGSGGXAPLRKCRPGF

SEQ ID NO: 1431 - protein, 27 aa, Artificial Sequence
  epitope within human TNFR2 to which antagonistic antibodies or fragments thereof bind
  VARIANT (10)...(10): Xaa is Cys residue protected with ACM protecting group
  VARIANT (17)...(17): Xaa is Cys residue protected with ACM protecting group
LSKQEGCRLXAGGSGGXAPLRKCRPGF

SEQ ID NO: 1432 - protein, 27 aa, Artificial Sequence
  epitope within human TNFR2 to which antagonistic antibodies or fragments thereof bind
  VARIANT (9)...(9): Xaa is Cys residue protected with ACM protecting group
  VARIANT (17)...(17): Xaa is Cys residue protected with ACM protecting group
SKQEGCRLXAPGGSGGXAPLRKCRPGF

SEQ ID NO: 1433 - protein, 27 aa, Artificial Sequence
  epitope within human TNFR2 to which antagonistic antibodies or fragments thereof bind
  VARIANT (8)...(8): Xaa is Cys residue protected with ACM protecting group
  VARIANT (17)...(17): Xaa is Cys residue protected with ACM protecting group
KQEGCRLXAPLGGSGGXAPLRKCRPGF

SEQ ID NO: 1434 - protein, 27 aa, Artificial Sequence
  epitope within human TNFR2 to which antagonistic antibodies or fragments thereof bind
  VARIANT (7)...(7): Xaa is Cys residue protected with ACM protecting group
  VARIANT (17)...(17): Xaa is Cys residue protected with ACM protecting group
QEGCRLXAPLRGGSGGXAPLRKCRPGF

SEQ ID NO: 1435 - protein, 27 aa, Artificial Sequence
  epitope within human TNFR2 to which antagonistic antibodies or fragments thereof bind
  VARIANT (6)...(6): Xaa is Cys residue protected with ACM protecting group
  VARIANT (17)...(17): Xaa is Cys residue protected with ACM protecting group
EGCRLXAPLRKGGSGGXAPLRKCRPGF

SEQ ID NO: 1436 - protein, 27 aa, Artificial Sequence
  epitope within human TNFR2 to which antagonistic antibodies or fragments thereof bind
  VARIANT (3)...(3): Xaa is Cys residue protected with ACM protecting group
WYXALSKQEGCGGSGGAPLRKCRPGFG

SEQ ID NO: 1437 - protein, 27 aa, Artificial Sequence
  epitope within human TNFR2 to which antagonistic antibodies or fragments thereof bind
  VARIANT (2)...(2): Xaa is Cys residue protected with ACM protecting group
YXALSKQEGCRGGSGGAPLRKCRPGFG

SEQ ID NO: 1438 - protein, 27 aa, Artificial Sequence
  epitope within human TNFR2 to which antagonistic antibodies or fragments thereof bind
  VARIANT (1)...(1): Xaa is Cys residue protected with ACM protecting group
XALSKQEGCRLGGSGGAPLRKCRPGFG

SEQ ID NO: 1439 - protein, 27 aa, Artificial Sequence
  epitope within human TNFR2 to which antagonistic antibodies or fragments thereof bind
  VARIANT (11)...(11): Xaa is Cys residue protected with ACM protecting group
ALSKQEGCRLXGGSGGAPLRKCRPGFG

SEQ ID NO: 1440 - protein, 27 aa, Artificial Sequence
  epitope within human TNFR2 to which antagonistic antibodies or fragments thereof bind
  VARIANT (10)...(10): Xaa is Cys residue protected with ACM protecting group
LSKQEGCRLXAGGSGGAPLRKCRPGFG

SEQ ID NO: 1441 - protein, 27 aa, Artificial Sequence
  epitope within human TNFR2 to which antagonistic antibodies or fragments thereof bind
  VARIANT (9)...(9): Xaa is Cys residue protected with ACM protecting group
SKQEGCRLXAPGGSGGAPLRKCRPGFG

SEQ ID NO: 1442 - protein, 27 aa, Artificial Sequence
  epitope within human TNFR2 to which antagonistic antibodies or fragments thereof bind
  VARIANT (8)...(8): Xaa is Cys residue protected with ACM protecting group
KQEGCRLXAPLGGSGGAPLRKCRPGFG

SEQ ID NO: 1443 - protein, 27 aa, Artificial Sequence
  epitope within human TNFR2 to which antagonistic antibodies or fragments thereof bind
  VARIANT (7)...(7): Xaa is Cys residue protected with ACM protecting group
QEGCRLXAPLRGGSGGAPLRKCRPGFG

SEQ ID NO: 1444 - protein, 27 aa, Artificial Sequence
  epitope within human TNFR2 to which antagonistic antibodies or fragments thereof bind
  VARIANT (6)...(6): Xaa is Cys residue protected with ACM protecting group
EGCRLXAPLRKGGSGGAPLRKCRPGFG

SEQ ID NO: 1445 - protein, 27 aa, Artificial Sequence
  epitope within human TNFR2 to which antagonistic antibodies or fragments thereof bind
  VARIANT (3)...(3): Xaa is Cys residue protected with ACM protecting group
WYXALSKQEGCGGSGGPLRKCRPGFGV

SEQ ID NO: 1446 - protein, 27 aa, Artificial Sequence
  epitope within human TNFR2 to which antagonistic antibodies or fragments thereof bind
  VARIANT (2)...(2): Xaa is Cys residue protected with ACM protecting group
YXALSKQEGCRGGSGGPLRKCRPGFGV

SEQ ID NO: 1447 - protein, 27 aa, Artificial Sequence
  epitope within human TNFR2 to which antagonistic antibodies or fragments thereof bind
  VARIANT (1)...(1): Xaa is Cys residue protected with ACM protecting group
XALSKQEGCRLGGSGGPLRKCRPGFGV

SEQ ID NO: 1448 - protein, 27 aa, Artificial Sequence
  epitope within human TNFR2 to which antagonistic antibodies or fragments thereof bind
  VARIANT (11)...(11): Xaa is Cys residue protected with ACM protecting group
ALSKQEGCRLXGGSGGPLRKCRPGFGV

SEQ ID NO: 1449 - protein, 27 aa, Artificial Sequence
  epitope within human TNFR2 to which antagonistic antibodies or fragments thereof bind
  VARIANT (10)...(10): Xaa is Cys residue protected with ACM protecting group
LSKQEGCRLXAGGSGGPLRKCRPGFGV

SEQ ID NO: 1450 - protein, 27 aa, Artificial Sequence
  epitope within human TNFR2 to which antagonistic antibodies or fragments thereof bind
  VARIANT (9)...(9): Xaa is Cys residue protected with ACM protecting group
SKQEGCRLXAPGGSGGPLRKCRPGFGV

SEQ ID NO: 1451 - protein, 27 aa, Artificial Sequence
  epitope within human TNFR2 to which antagonistic antibodies or fragments thereof bind
  VARIANT (8)...(8): Xaa is Cys residue protected with ACM protecting group
KQEGCRLXAPLGGSGGPLRKCRPGFGV

SEQ ID NO: 1452 - protein, 27 aa, Artificial Sequence
  epitope within human TNFR2 to which antagonistic antibodies or fragments thereof bind
  VARIANT (7)...(7): Xaa is Cys residue protected with ACM protecting group
QEGCRLXAPLRGGSGGPLRKCRPGFGV

SEQ ID NO: 1453 - protein, 27 aa, Artificial Sequence
  epitope within human TNFR2 to which antagonistic antibodies or fragments thereof bind
  VARIANT (6)...(6): Xaa is Cys residue protected with ACM protecting group
EGCRLXAPLRKGGSGGPLRKCRPGFGV

SEQ ID NO: 1454 - protein, 27 aa, Artificial Sequence
  epitope within human TNFR2 to which antagonistic antibodies or fragments thereof bind
  VARIANT (3)...(3): Xaa is Cys residue protected with ACM protecting group
WYXALSKQEGCGGSGGLRKCRPGFGVA

SEQ ID NO: 1455 - protein, 27 aa, Artificial Sequence
  epitope within human TNFR2 to which antagonistic antibodies or fragments thereof bind
  VARIANT (2)...(2): Xaa is Cys residue protected with ACM protecting group
YXALSKQEGCRGGSGGRKCRPGFGVAR

SEQ ID NO: 1456 - protein, 27 aa, Artificial Sequence
  epitope within human TNFR2 to which antagonistic antibodies or fragments thereof bind
  VARIANT (1)...(1): Xaa is Cys residue protected with ACM protecting group
XALSKQEGCRLGGSGGRKCRPGFGVAR

SEQ ID NO: 1457 - protein, 27 aa, Artificial Sequence
  epitope within human TNFR2 to which antagonistic antibodies or fragments thereof bind
  VARIANT (11)...(11): Xaa is Cys residue protected with ACM protecting group
ALSKQEGCRLXGGSGGRKCRPGFGVAR

SEQ ID NO: 1458 - protein, 27 aa, Artificial Sequence
  epitope within human TNFR2 to which antagonistic antibodies or fragments thereof bind
  VARIANT (10)...(10): Xaa is Cys residue protected with ACM protecting group
LSKQEGCRLXAGGSGGRKCRPGFGVAR

SEQ ID NO: 1459 - protein, 27 aa, Artificial Sequence
  epitope within human TNFR2 to which antagonistic antibodies or fragments thereof bind
  VARIANT (9)...(9): Xaa is Cys residue protected with ACM protecting group
SKQEGCRLXAPGGSGGRKCRPGFGVAR

SEQ ID NO: 1460 - protein, 27 aa, Artificial Sequence
  epitope within human TNFR2 to which antagonistic antibodies or fragments thereof bind
  VARIANT (8)...(8): Xaa is Cys residue protected with ACM protecting group
KQEGCRLXAPLGGSGGRKCRPGFGVAR

SEQ ID NO: 1461 - protein, 27 aa, Artificial Sequence
  epitope within human TNFR2 to which antagonistic antibodies or fragments thereof bind
  VARIANT (7)...(7): Xaa is Cys residue protected with ACM protecting group
QEGCRLXAPLRGGSGGRKCRPGFGVAR

SEQ ID NO: 1462 - protein, 27 aa, Artificial Sequence
  epitope within human TNFR2 to which antagonistic antibodies or fragments thereof bind
  VARIANT (6)...(6): Xaa is Cys residue protected with ACM protecting group
EGCRLXAPLRKGGSGGRKCRPGFGVAR

SEQ ID NO: 1463 - protein, 11 aa, Artificial Sequence
  epitope within human TNFR2 to which antagonistic antibodies or fragments thereof bind
LRKCRPGFGVA

SEQ ID NO: 1464 - protein, 13 aa, Artificial Sequence
  epitope within human TNFR2 to which antagonistic antibodies or fragments thereof bind
VVCKPCAPGTFSN

SEQ ID NO: 1465 - protein, 645 aa, Artificial Sequence
  RB242 human EGFR ECD w/ modifications T15S and G564S (residue numbering does not include signal peptide)
  SIGNAL (1)...(24): signal peptide
  DOMAIN (25)...(645): EGFR/HER1 extracellular domain (ECD)
MRPSGTAGAALLALLAALCPASRALEEKKVCQGTSNKLSQLGTFEDHFLSLQRMFNNCEVVLGNLEITYVQRNYDLSFLKTIQEVAGYVLIALNTVERIPLENLQIIRGNMYYENSYALAVLSNYDANKTGLKELPMRNLQEILHGAVRFSNNPALCNVESIQWRDIVSSDFLSNMSMDFQNHLGSCQKCDPSCPNGSCWGAGEENCQKLTKIICAQQCSGRCRGKSPSDCCHNQCAAGCTGPRESDCLVCRKFRDEATCKDTCPPLMLYNPTTYQMDVNPEGKYSFGATCVKKCPRNYVVTDHGSCVRACGADSYEMEEDGVRKCKKCEGPCRKVCNGIGIGEFKDSLSINATNIKHFKNCTSISGDLHILPVAFRGDSFTHTPPLDPQELDILKTVKEITGFLLIQAWPENRTDLHAFENLEIIRGRTKQHGQFSLAVVSLNITSLGLRSLKEISDGDVIISGNKNLCYANTINWKKLFGTSGQKTKIISNRGENSCKATGQVCHALCSPEGCWGPEPRDCVSCRNVSRGRECVDKCKLLEGEPREFVENSECIQCHPECLPQAMNITCTGRGPDNCIQCAHYIDSPHCVKTCPAGVMGENNTLVWKYADAGHVCHLCHPNCTYGCTGPGLEGCPTNGPKIPS

SEQ ID NO: 1466 - protein, 621 aa, Artificial Sequence
  RB242 human EGFR ECD (without the signal peptide), with modifications T15S and G564S
LEEKKVCQGTSNKLSQLGTFEDHFLSLQRMFNNCEVVLGNLEITYVQRNYDLSFLKTIQEVAGYVLIALNTVERIPLENLQIIRGNMYYENSYALAVLSNYDANKTGLKELPMRNLQEILHGAVRFSNNPALCNVESIQWRDIVSSDFLSNMSMDFQNHLGSCQKCDPSCPNGSCWGAGEENCQKLTKIICAQQCSGRCRGKSPSDCCHNQCAAGCTGPRESDCLVCRKFRDEATCKDTCPPLMLYNPTTYQMDVNPEGKYSFGATCVKKCPRNYVVTDHGSCVRACGADSYEMEEDGVRKCKKCEGPCRKVCNGIGIGEFKDSLSINATNIKHFKNCTSISGDLHILPVAFRGDSFTHTPPLDPQELDILKTVKEITGFLLIQAWPENRTDLHAFENLEIIRGRTKQHGQFSLAVVSLNITSLGLRSLKEISDGDVIISGNKNLCYANTINWKKLFGTSGQKTKIISNRGENSCKATGQVCHALCSPEGCWGPEPRDCVSCRNVSRGRECVDKCKLLEGEPREFVENSECIQCHPECLPQAMNITCTGRGPDNCIQCAHYIDSPHCVKTCPAGVMGENNTLVWKYADAGHVCHLCHPNCTYGCTGPGLEGCPTNGPKIPS

SEQ ID NO: 1467 - protein, 643 aa, Artificial Sequence
  RB242 human HER3 ECD with modification Y246A (residue numbering does not include signal peptide)
  SIGNAL (1)...(19): signal peptide
  DOMAIN (20)...(643): HER3 extracellular domain (ECD)
MRANDALQVLGLLFSLARGSEVGNSQAVCPGTLNGLSVTGDAENQYQTLYKLYERCEVVMGNLEIVLTGHNADLSFLQWIREVTGYVLVAMNEFSTLPLPNLRVVRGTQVYDGKFAIFVMLNYNTNSSHALRQLRLTQLTEILSGGVYIEKNDKLCHMDTIDWRDIVRDRDAEIVVKDNGRSCPPCHEVCKGRCWGPGSEDCQTLTKTICAPQCNGHCFGPNPNQCCHDECAGGCSGPQDTDCFACRHFNDSGACVPRCPQPLVANKLTFQLEPNPHTKYQYGGVCVASCPHNFVVDQTSCVRACPPDKMEVDKNGLKMCEPCGGLCPKACEGTGSGSRFQTVDSSNIDGFVNCTKILGNLDFLITGLNGDPWHKIPALDPEKLNVFRTVREITGYLNIQSWPPHMHNFSVFSNLTTIGGRSLYNRGFSLLIMKNLNVTSLGFRSLKEISAGRIYISANRQLCYHHSLNWTKVLRGPTEERLDIKHNRPRRDCVAEGKVCDPLCSSGGCWGPGPGQCLSCRNYSRGGVCVTHCNFLNGEPREFAHEAECFSCHPECQPMEGTATCNGSGSDTCAQCAHFRDGPHCVSSCPHGVLGAKGPIYKYPDVQNECRPCHENCTQGCKGPELQDCLGQTLVLIGKTHLT

SEQ ID NO: 1468 - protein, 624 aa, Artificial Sequence
  RB242 human HER3 ECD (without signal peptide), with modification Y246A
SEVGNSQAVCPGTLNGLSVTGDAENQYQTLYKLYERCEVVMGNLEIVLTGHNADLSFLQWIREVTGYVLVAMNEFSTLPLPNLRVVRGTQVYDGKFAIFVMLNYNTNSSHALRQLRLTQLTEILSGGVYIEKNDKLCHMDTIDWRDIVRDRDAEIVVKDNGRSCPPCHEVCKGRCWGPGSEDCQTLTKTICAPQCNGHCFGPNPNQCCHDECAGGCSGPQDTDCFACRHFNDSGACVPRCPQPLVANKLTFQLEPNPHTKYQYGGVCVASCPHNFVVDQTSCVRACPPDKMEVDKNGLKMCEPCGGLCPKACEGTGSGSRFQTVDSSNIDGFVNCTKILGNLDFLITGLNGDPWHKIPALDPEKLNVFRTVREITGYLNIQSWPPHMHNFSVFSNLTTIGGRSLYNRGFSLLIMKNLNVTSLGFRSLKEISAGRIYISANRQLCYHHSLNWTKVLRGPTEERLDIKHNRPRRDCVAEGKVCDPLCSSGGCWGPGPGQCLSCRNYSRGGVCVTHCNFLNGEPREFAHEAECFSCHPECQPMEGTATCNGSGSDTCAQCAHFRDGPHCVSSCPHGVLGAKGPIYKYPDVQNECRPCHENCTQGCKGPELQDCLGQTLVLIGKTHLT

SEQ ID NO: 1469 - protein, 227 aa, Artificial Sequence
  Human IgG1 Fc with knob mutations S354C and T366W (by EU numbering)
  SITE (1)...(10): DKTHTCPPCP = portion of hinge region of human IgG1
  DOMAIN (11)...(227): CH2 and CH3 domains of human IgG1
DKTHTCPPCPAPELLGGPSVFLFPPKPKDTLMISRTPEVTCVVVDVSHEDPEVKFNWYVDGVEVHNAKTKPREEQYNSTYRVVSVLTVLHQDWLNGKEYKCKVSNKALPAPIEKTISKAKGQPREPQVYTLPPCRDELTKNQVSLWCLVKGFYPSDIAVEWESNGQPENNYKTTPPVLDSDGSFFLYSKLTVDKSRWQQGNVFSCSVMHEALHNHYTQKSLSLSPGK

SEQ ID NO: 1470 - protein, 227 aa, Artificial Sequence
  Human IgG1 Fc with hole mutations Y349C, T366S, L368A and Y407V (by EU numbering)
  SITE (1)...(10): DKTHTCPPCP = portion of hinge region of human IgG1
  DOMAIN (11)...(227): CH2 and CH3 domains of human IgG1
DKTHTCPPCPAPELLGGPSVFLFPPKPKDTLMISRTPEVTCVVVDVSHEDPEVKFNWYVDGVEVHNAKTKPREEQYNSTYRVVSVLTVLHQDWLNGKEYKCKVSNKALPAPIEKTISKAKGQPREPQVCTLPPSRDELTKNQVSLSCAVKGFYPSDIAVEWESNGQPENNYKTTPPVLDSDGSFFLVSKLTVDKSRWQQGNVFSCSVMHEALHNHYTQKSLSLSPGK

SEQ ID NO: 1471 - protein, 5 aa, Artificial Sequence
  GS linker
  REPEAT (1)...(5): occurring 1, 2, 3, 4 or 5 times
GGGGS

SEQ ID NO: 1472 - protein, 5 aa, Artificial Sequence
  GS linker
  REPEAT (1)...(5): occurring 1, 2, 3, 4, 5, 6, 7, 8, 9 or 10 times
GGGGS

SEQ ID NO: 1473 - protein, 6 aa, Artificial Sequence
  Gly linker
GGGGGG

SEQ ID NO: 1474 - protein, 8 aa, Artificial Sequence
  Gly linker
GGGGGGGG

SEQ ID NO: 1475 - protein, 732 aa, Artificial Sequence
  Construct containing Vhh-4
  SIGNAL (1)...(19): mouse immunoglobulin heavy-chain leader sequence
  DOMAIN (20)...(138): anti-TNFR1 dAb
  PEPTIDE (139)...(147): Linker
  DOMAIN (148)...(732): Human Serum Albumin (HSA)
MEWSWVFLFFLSVTTGVHSEVQLLESGGGLVQPGGSLRLSCAASGFTFAHETMVWVRQAPGKGLEWVSHIPPDGQDPFYADSVKGRFTISRDNSKNTLYLQMNSLRAEDTAVYHCALLPKRGPWFDYWGQGTLVTVSSGGGGSGGGGDAHKSEVAHRFKDLGEENFKALVLIAFAQYLQQCPFEDHVKLVNEVTEFAKTCVADESAENCDKSLHTLFGDKLCTVATLRETYGEMADCCAKQEPERNECFLQHKDDNPNLPRLVRPEVDVMCTAFHDNEETFLKKYLYEIARRHPYFYAPELLFFAKRYKAAFTECCQAADKAACLLPKLDELRDEGKASSAKQRLKCASLQKFGERAFKAWAVARLSQRFPKAEFAEVSKLVTDLTKVHTECCHGDLLECADDRADLAKYICENQDSISSKLKECCEKPLLEKSHCIAEVENDEMPADLPSLAADFVESKDVCKNYAEAKDVFLGMFLYEYARRHPDYSVVLLLRLAKTYETTLEKCCAAADPHECYAKVFDEFKPLVEEPQNLIKQNCELFEQLGEYKFQNALLVRYTKKVPQVSTPTLVEVSRNLGKVGSKCCKHPEAKRMPCAEDYLSVVLNQLCVLHEKTPVSDRVTKCCTESLVNRRPCFSALEVDETYVPKEFNAETFTFHADICTLSEKERQIKKQTALVELVKHKPKATKEQLKAVMDDFAAFVEKCCKADDKETCFAEEGKKLVAASQAALGL

SEQ ID NO: 1476 - protein, 19 aa, Mus musculus
  mouse immunoglobulin heavy-chain leader sequence Uniprot: A0N1R4
MEWSWVFLFFLSVTTGVHS

SEQ ID NO: 1477 - protein, 7 aa, Artificial Sequence
  Linker
GGSGGGG

SEQ ID NO: 1478 - protein, 116 aa, Artificial Sequence
  Vhh-2
EVQLLESGGGLVQPGGSLRLSCAASGFTFSQYRMHWVRQAPGKSLEWVSSIDTRGSSTYYADPVKGRFTISRDNSKNTLYLQMNSLRAEDTAVYYCAKAVTMFSPFFDYWGQGTLV

SEQ ID NO: 1479 - protein, 122 aa, Artificial Sequence
  Vhh
EEVQLLESGGGLVQAGGSLRLSCAASGFTFAHETMVWVRQAPGKGLEWVSHIPPDGQDPFYADSVKGRFFTISRDNSKNTLYLQMNSLRAEDTAVYHCALLPKRGPWFDYWGQGTLYTVSSA

What is claimed:

1. A construct that is a tumor necrosis factor receptor 1 (TNFR1) antagonist construct of formula 1:
(TNFR1 inhibitor)ₙ-linkerₚ-(activity modifier)_{q}, wherein:
each of n and q is an integer, and each is independently 1, 2, or 3;
p is 0, 1, 2 or 3;
a TNFR1 inhibitor is a molecule that binds TNFR1 to inhibit (antagonize) activity of TNFR1;
an activity modifier is a moiety that modulates or alters the activity or the pharmacological property of the construct compared to the construct in the absence of the activity modifier;
the activity modifier is not an unmodified Fc region or a human serum albumin antibody; and a linker increases flexibility of the construct, and/or moderates or reduces steric effects of the construct or its interaction with a receptor, and/or increases solubility of the construct in aqueous medium.

2. The construct of claim 1, wherein the linker is selected from among a chemical linker, a polypeptide linker, and combinations thereof.

3. The construct of claim 1 that is a fusion protein.

4. The construct of claim 1, wherein the TNFR1 inhibitor comprises a domain antibody (dAb).

5. The construct of claim 4, wherein the activity modifier alters the isoelectric point (pI) of the resulting construct, whereby the pI is lower or higher than the pI of human blood.

6. The construct of claim 1, wherein, one or more of:
the TNFR1 inhibitor inhibits TNFR1 signaling;
the activity modifier increases serum half-life of the construct; and/or
the activity modifier is a modified Fc that has one or more of:
a) a modification(s) to introduce knobs-into-holes;
b) a modification(s) to increase or enhance neonatal Fc receptor (FcRn) recycling; and
c) a modification(s) to reduce or eliminate immune effector functions, selected from among one or more of complement-dependent cytotoxicity (CDC), antibody-dependent cell-mediated cytotoxicity (ADCC) and antibody-dependent cell-mediated phagocytosis (ADCP).

7. The construct of claim 1, wherein the activity modifier is albumin or an Fc that is modified to have reduced or no ADCC activity and/or reduced or no CDC activity.

8. The construct of claim 1, wherein the TNFR1 inhibitor inhibits a TNFR1 activity, but does not antagonize tumor necrosis factor receptor 2 (TNFR2) activity.

9. The construct of claim 8, where the TNFR1 inhibitor inhibits TNFR1 signaling.

10. The construct of claim 1 that is a TNFR1 antagonist construct, comprising a TNFR1 inhibitor that is a single chain antibody or antigen-binding portion thereof that specifically targets and inhibits TNFR1, but does not antagonize TNFR2, thereby preventing transient activation of TNFR1 via receptor clustering.

11. The construct of claim 1 that comprises a linker, wherein the linker is selected from among:
a) a linker that comprises all or a portion of the hinge sequence of trastuzumab, SCDKTH (corresponding to residues 222-227 of SEQ ID NO:26) or up to the full sequence of the hinge region of trastuzumab, that contains or has the sequence EPKSCDKTHTCPPCP (corresponding to residues 219-233 of SEQ ID NO:26), or at least 5, 6, 7, 8, 9, 10, or 11 contiguous residues thereof, or residues ESKYGPPCPPCP, set forth as residues 212-223 of SEQ ID NO:29, or a sequence having at least 98% or 99% sequence identity thereto that is a linker;
b) a linker that is or comprises a glycine-serine (GS) linker;
c) a GS linker selected from among (GlySer)ₙ, where n=1-10; (GlySer₂); (Gly₄Ser)ₙ, where n=1-10; (Gly₃Ser)ₙ, where n=1-5; (SerGly₄)ₙ, where n=1-5; (GlySerSerGly)ₙ, where n=1-5; GSGGSSGG; GSSSGSGSGSSG; GSSSGSGSGSSGG; GGSSGG; GGSSGGSGGSSSG; GSSSGSGSGGSSSGSGSG; GGSSGGSSGGGSSGGSSG; and GSSSGS;
d) a linker that comprises a GS linker and all or a portion of the hinge sequence of trastuzumab, corresponding to residues EPKSCDKTHTCPPCP, set forth as residues 219-233 of SEQ ID NO:26;
e) a linker that comprises a GS linker and comprises the sequence SCDKTH, corresponding to residues 217-222 of SEQ ID NO:31; and
f) a linker that comprises a GS linker and all or a portion of the hinge sequence of nivolumab, corresponding to residues 212-223 of SEQ ID NO:29.

12. The construct of claim 1, comprising the sequence of residues set forth in any one of SEQ ID NOs:704, 705, 710-725, 729-740, and 1475 or residues 20-732 of SEQ ID NO:1475, or a construct that inhibits TNFR1 and has a sequence with at least or at least about 95% sequence identity to the sequence of residues set forth in any one of SEQ ID NOs:704, 705, 710-725, 729-740, 1475, and residues 20-732 of SEQ ID NO: 1475.

13. The construct of claim 1, wherein the TNFR1 inhibitor comprises a domain antibody (dAb), or antigen-binding portion thereof or comprises the sequence of amino acids set forth in any of SEQ ID NOs: 52-672, or a sequence having at least 95% sequence identity thereto that retains TNFR1 inhibitor activity.

14. The construct of claim 1, comprising the sequence of amino acids set forth as residues 20-732 of SEQ ID NO:1475 or a sequence of amino acids having at least 95% sequence identity to residues 20-732 of SEQ ID NO:1475.

15. The construct of claim 1, comprising:
a) a domain antibody that inhibits TNFR1;
b) a linker that increases flexibility of the construct, reduces steric effects of the construct, or increases solubility of the construct in aqueous medium; and
c) a half-life extending moiety, wherein the moiety is not an anti-human serum albumin antibody or antigen-binding portion thereof.

16. The construct of claim 1 that is a TNFR1 antagonist, selected from among constructs:
a) a construct, comprising:
i) the domain antibody (dAb) of any of SEQ ID NOs:52-672, or the scFv of any of SEQ ID NOs:673-678, or the Fab of any of SEQ ID NOs:679-682, or the nanobody of SEQ ID NO: 683 or 684, or the TNF mutein of any of SEQ ID NOs:685-703;
ii) a GS linker selected from among (GlySer)ₙ, where n=1-10; (GlySer₂); (Gly₄Ser)ₙ, where n=1-10; (Gly₃Ser)ₙ, where n=1-5; (SerGly₄)ₙ, where n=1-5; (GlySerSerGly)ₙ, where n=1-5; GSGGSSGG; GSSSGSGSGSSG; GSSSGSGSGSSGG; GGSSGG; GGSSGGSGGSSSG; GSSSGSGSGGSSSGSGSG; GGSSGGSSGGGSSGGSSG; and GSSSGS; and
iii) a half-life extending moiety that is an IgG Fc;
b) a construct, comprising:
i) the domain antibody (dAb) of any of SEQ ID NOs:52-672, or the scFv of any of SEQ ID NOs:673-678, or the Fab of any of SEQ ID NOs:679-682, or the nanobody of SEQ ID NO: 683 or 684, or the TNF mutein of any of SEQ ID NOs:685-703;
ii) a linker selected from among all or a portion of the hinge sequence of trastuzumab and all or a portion of the hinge sequence of nivolumab; and
iii) a half-life extending moiety that is an IgG Fc;
c) a construct, comprising:
i) the domain antibody (dAb) of any of SEQ ID NOs:52-672, or the scFv of any of SEQ ID NOs:673-678, or the Fab of any of SEQ ID NOs:679-682, or the nanobody of SEQ ID NO: 683 or 684, or the TNF mutein of any of SEQ ID NOs:685-703;
ii) a GS linker selected from among (GlySer)ₙ, where n=1-10; (GlySer₂); (Gly₄Ser)ₙ, where n=1-10; (Gly₃Ser)ₙ, where n=1-5; (SerGly₄)ₙ, where n=1-5; (GlySerSerGly)ₙ, where n=1-5; GSGGSSGG; GSSSGSGSGSSG; GSSSGSGSGSSGG; GGSSGG; GGSSGGSGGSSSG; GSSSGSGSGGSSSGSGSG; GGSSGGSSGGGSSGGSSG; and GSSSGS;
iii) a second linker selected from among all or a portion of the hinge sequence of trastuzumab and all or a portion of the hinge sequence of nivolumab; and
iv) a half-life extending moiety that is an IgG Fc;
d) a construct, comprising:
i) the domain antibody (dAb) of any of SEQ ID NOs:52-672, or the scFv of any of SEQ ID NOs:673-678, or the Fab of any of SEQ ID NOs:679-682, or the nanobody of SEQ ID NO: 683 or 684, or the TNF mutein of any of SEQ ID NOs:685-703;
ii) a GS linker selected from among (GlySer)ₙ, where n=1-10; (GlySer₂); (Gly₄Ser)ₙ, where n=1-10; (Gly₃Ser)ₙ, where n=1-5; (SerGly₄)ₙ, where n=1-5; (GlySerSerGly)ₙ, where n=1-5; GSGGSSGG; GSSSGSGSGSSG; GSSSGSGSGSSGG; GGSSGG; GGSSGGSGGSSSG; GSSSGSGSGGSSSGSGSG; GGSSGGSSGGGSSGGSSG; and GSSSGS; and
iii) a half-life extending moiety that is a PEG molecule;
e) a construct, comprising:
i) the domain antibody (dAb) of any of SEQ ID NOs:52-672, or the scFv of any of SEQ ID NOs:673-678, or the Fab of any of SEQ ID NOs:679-682, or the nanobody of SEQ ID NO: 683 or 684, or the TNF mutein of any of SEQ ID NOs:685-703;
ii) a GS linker selected from among (GlySer)ₙ, where n=1-10; (GlySer₂); (Gly₄Ser)ₙ, where n=1-10; (Gly₃Ser)ₙ, where n=1-5; (SerGly₄)ₙ, where n=1-5; (GlySerSerGly)ₙ, where n=1-5; GSGGSSGG; GSSSGSGSGSSG; GSSSGSGSGSSGG; GGSSGG; GGSSGGSGGSSSG; GSSSGSGSGGSSSGSGSG; GGSSGGSSGGGSSGGSSG; and GSSSGS; and
iii) a half-life extending moiety that is human serum albumin; and
f) any of the constructs of a)-e), wherein the linker is optional, whereby the dAb is linked directly to the half-life extending moiety.

17. The construct of claim 16, comprising human serum albumin (HSA) linked to a dAb directly or via a linker.

18. The construct of claim 1, comprising residues 20-732 of SEQ ID NO:1475, containing the dAb of SEQ ID NO:59, linked via a linker to HSA, as set forth in SEQ ID NO:1475, or a construct having at least 95%, 96%, 97%, 98%, or 99% sequence identity to the construct of SEQ ID NO:1475 and having TNFR1 antagonist activity.

19. The construct of claim 16 that comprises a dAb set forth in any of SEQ ID NOs:52-83, 503-672, 1478 and 1479, and variants thereof having at least 95%, 96%, 97%, 98%, or 99% sequence identity thereto, whereby the construct has TNFR1 antagonist activity.

20. The construct of claim 1 that is a multi-specific TNFR1 inhibitor/TNFR2 agonist construct, wherein:
the TNFR1 inhibitor selectively inhibits or antagonizes TNFR1 signaling without inhibiting or antagonizing TNFR2 signaling;
the TNFR1 inhibitor does not interfere with the activation or agonism of TNFR2;
the TNFR2 agonist selectively activates or agonizes TNFR2 signaling without activating or agonizing TNFR1 signaling; and
the TNFR2 agonist does not interfere with the inhibition or antagonism of TNFR1.

21. The construct of claim 20, wherein:
a) the TNFR1 inhibitor is selected from among:
i) an antigen-binding fragment of a human anti-TNFR1 antagonist monoclonal antibody selected from H398 or ATROSAB or a polypeptide with a sequence having at least 95% sequence identity therewith; or
ii) the domain antibody (dAb) of any of SEQ ID NOs:52-672, or the scFv of any of SEQ ID NOs:673-678, or the Fab of any of SEQ ID NOs:679-682, or the nanobody of SEQ ID NO: 683 or 684, or the TNF mutein of any of SEQ ID NOs:701-703, or a polypeptide with a sequence that has at least 95% sequence identity with any of the preceding polypeptides, and is a TNFR1 inhibitor; or
iii) a dominant-negative tumor necrosis factor (DN-TNF) or TNF mutein comprising a soluble TNF molecule, with one or more amino acid replacements that confer selective inhibition of TNFR1 and are selected from among:
V1M, L29S, L29G, L29Y, R31C, R31E, R31N, R32Y, R32W, C69V, A84S, V85T, S86T, Y87H, Q88N, T89Q, I97T, C101A, A145R, E146R, L29S/R32W, L29S/S86T, R32W/S86T, L29S/R32W/S86T, R31N/R32T, R31E/S86T, R31N/R32T/S86T, I97T/A145R, V1M/R31C/C69V/Y87H/C101A/A145R, and A84S/V85T/S86T/Y87H/Q88N/T89Q, with reference to the sequence of soluble TNF, set forth in SEQ ID NO:2;
b) the linker is selected from:
i) a GS linker selected from (GlySer)ₙ, where n=1-10; (GlySer₂); (Gly₄Ser)ₙ, where n=1-10; (Gly₃Ser)ₙ, where n=1-5; (SerGly₄)ₙ, where n=1-5; (GlySerSerGly)ₙ, where n=1-5; GSGGSSGG; GSSSGSGSGSSG; GSSSGSGSGSSGG; GGSSGG; GGSSGGSGGSSSG; GSSSGSGSGGSSSGSGSG; GGSSGGSSGGGSSGGSSG; and GSSSGS; and/or
ii) all or a portion of the hinge sequence of trastuzumab, corresponding to residues 219-233 of SEQ ID NO:26, or all or a portion of the hinge sequence of nivolumab, corresponding to residues 212-223 of SEQ ID NO:29; and
iii) an IgG1 or IgG4 Fc, wherein:
the IgG1 Fc is selected from the IgG1 Fc of human IgG1, set forth in SEQ ID NO: 10, or the IgG1 Fc of trastuzumab, set forth in SEQ ID NO:27;
the IgG4 Fc is selected from the IgG4 Fc of human IgG4, set forth in SEQ ID NO:16, or the IgG4 Fc of nivolumab, set forth in SEQ ID NO:30; and
optionally, the Fc includes one or more modifications to introduce knobs-into-holes, and/or increase or enhance neonatal Fc receptor (FcRn) recycling, and/or reduce or eliminate immune effector functions; and
c) the TNFR2 agonist is selected from:
i) an antigen-binding fragment that binds to one or more epitopes within human TNFR2 that is selected from among the epitopes set forth in SEQ ID NOs:839-865, 1202, and 1204; or
ii) an antigen-binding fragment of an agonistic human anti-TNFR2 antibody selected from MR2-1 or MAB2261; or
iii) a TNFR2-selective TNF mutein that is a soluble TNF variant comprising one or more TNFR2-selective mutations selected from among K65W, D143Y, D143F, D143N, D143E, D143W, D143V, A145R, A145H, A145K, A145F, A145W, E146Q, E146H, E146K, E146N, D143N/A145R, A145R/S147T, Q88N/T89S/A145S/E146A/S147D, Q88N/A145I/E146G/S147D, A145H/E146S/S147D, A145H/S147D, L29V/A145D/E146D/S147D, A145N/E146D/S147D, A145T/E146S/S147D, A145Q/E146D/S147D, A145T/E146D/S147D, A145D/E146G/S147D, A145D/S147D, A145K/E146D/S147T, A145R/E146T/S147D, A145R/S147T, E146D/S147D, D143V/F144L/A145S, S95C/G148C, and D143V/A145S, with reference to SEQ ID NO:2; or
iv) a single-chain TNFR2-selective TNF mutein trimer, comprising the mutations D143N/A145R, wherein the TNF muteins are linked by (GGGGS)ₙ, where n=1-5, or all or a portion of the stalk region of TNF (SEQ ID NO:812); or
v) a TNFR2-selective agonist comprising the formula:
MD-L1-TNFmut-L2-TNFmut-L3-TNFmut (Formula II); or
TNFmut-L1-TNFmut-L2-TNFmut-L3-MD (Formula III);
whereby MD is a multimerization domain; TNFmut is a TNFR2-selective TNF mutein; and L1, L2 and L3 are linkers that can be the same or different, and wherein:
the MD is selected from EHD2 (SEQ ID NO:808), MH D2 (SEQ ID NO:811), the trimerization domain of chicken tenascin C (TNC) (residues 110-139 of SEQ ID NO:804; SEQ ID NO:805), or the trimerization domain of human TNC (residues 110-139 of SEQ ID NO:806, SEQ ID NO:807);
L1, L2 and L3 each are (GGGGS)ₙ, where n=1-5, or all or a portion of the stalk region of TNF (SEQ ID NO:812), or a mixture thereof; and
the TNF muteins comprise the TNFR2-selective mutations D143N/A145R.

22. The construct of claim 20 that is a multi-specific TNFR1 antagonist/TNFR2 agonist construct selected from among:
a) a construct, wherein:
i) the TNFR1 inhibitor comprises a domain antibody (dAb) of any of SEQ ID NOs:52-672, or the scFv of any of SEQ ID NOs:673-678, or the Fab of any of SEQ ID NOs:679-682, or the nanobody of SEQ ID NO: 683 or 684, or the TNF mutein of any of SEQ ID NOs:701-703, or a sequence with at least or at least about 95% sequence identity thereto;
ii) the linker comprises (GGGGS)₃, the polypeptide comprising the sequence SCDKTH (residues 222-227 of SEQ ID NO:26), and the Fc of trastuzumab; and
iii) the TNFR2 agonist comprises a TNFR2-selective TNF mutein that is a soluble TNF variant comprising one or more TNFR2-selective mutations selected from among K65W, D143Y, D143F, D143N, D143E, D143W, D143V, A145R, A145H, A145K, A145F, A145W, E146Q, E146H, E146K, E146N, D143N/A145R, A145R/S147T, Q88N/T89S/A145S/E146A/S147D, Q88N/A145I/E146G/S147D, A145H/E146S/S147D, A145H/S147D, L29V/A145D/E146D/S147D, A145N/E146D/S147D, A145T/E146S/S147D, A145Q/E146D/S147D, A145T/E146D/S147D, A145D/E146G/S147D, A145D/S147D, A145K/E146D/S147T, A145R/E146T/S147D, A145R/S147T, E146D/S147D, D143V/F144L/A145S, S95C/G148C, and D143V/A145S, with reference to SEQ ID NO:2;
b) a construct, wherein:
i) the TNFR1 inhibitor comprises a domain antibody (dAb) of any of SEQ ID NOs:52-672, or the scFv of any of SEQ ID NOs:673-678, or the Fab of any of SEQ ID NOs:679-682, or the nanobody of SEQ ID NO: 683 or 684, or the TNF mutein of any of SEQ ID NOs:701-703, or a sequence with at least or at least about 95% sequence identity thereto;
ii) the linker comprises (GGGGS)₃, all or a portion of the hinge sequence of nivolumab, and the Fc of nivolumab; and
iii) the TNFR2 agonist comprises a TNFR2-selective TNF mutein that is a soluble TNF variant comprising one or more TNFR2-selective mutations selected from among K65W, D143Y, D143F, D143N, D143E, D143W, D143V, A145R, A145H, A145K, A145F, A145W, E146Q, E146H, E146K, E146N, D143N/A145R, A145R/S147T, Q88N/T89S/A145S/E146A/S147D, Q88N/A145I/E146G/S147D, A145H/E146S/S147D, A145H/S147D, L29V/A145D/E146D/S147D, A145N/E146D/S147D, A145T/E146S/S147D, A145Q/E146D/S147D, A145T/E146D/S147D, A145D/E146G/S147D, A145D/S147D, A145K/E146D/S147T, A145R/E146T/S147D, A145R/S147T, E146D/S147D, D143V/F144L/A145S, S95C/G148C, and D143V/A145S, with reference to SEQ ID NO:2;
c) a construct, wherein:
i) the TNFR1 inhibitor comprises a domain antibody (dAb) of any of SEQ ID NOs:52-672, or the scFv of any of SEQ ID NOs:673-678, or the Fab of any of SEQ ID NOs:679-682, or the nanobody of SEQ ID NO: 683 or 684, or the TNF mutein of any of SEQ ID NOs:701-703, or a sequence with at least or at least about 95% sequence identity thereto;
ii) the linker comprises (GGGGS)₃, and the Fc of trastuzumab; and
iii) the TNFR2 agonist comprises a TNFR2-selective TNF mutein that is a soluble TNF variant comprising one or more TNFR2-selective mutations selected from among K65W, D143Y, D143F, D143N, D143E, D143W, D143V, A145R, A145H, A145K, A145F, A145W, E146Q, E146H, E146K, E146N, D143N/A145R, A145R/S147T, Q88N/T89S/A145S/E146A/S147D, Q88N/A145I/E146G/S147D, A145H/E146S/S147D, A145H/S147D, L29V/A145D/E146D/S147D, A145N/E146D/S147D, A145T/E146S/S147D, A145Q/E146D/S147D, A145T/E146D/S147D, A145D/E146G/S147D, A145D/S147D, A145K/E146D/S147T, A145R/E146T/S147D, A145R/S147T, E146D/S147D, D143V/F144L/A145S, S95C/G148C, and D143V/A145S, with reference to SEQ ID NO:2; and
d) a construct, wherein:
i) the TNFR1 inhibitor comprises a domain antibody (dAb) of any of SEQ ID NOs:52-672, or the scFv of any of SEQ ID NOs:673-678 or the Fab of any of SEQ ID NOs:679-682, or the nanobody of SEQ ID NO: 683 or 684, or the TNF mutein of any of SEQ ID NOs:701-703, or a sequence with at least or at least about 95% sequence identity thereto;
ii) the linker comprises (GGGGS)₃, and the Fc of nivolumab; and
iii) the TNFR2 agonist comprises a TNFR2-selective TNF mutein that is a soluble TNF variant comprising one or more TNFR2-selective mutations selected from among K65W, D143Y, D143F, D143N, D143E, D143W, D143V, A145R, A145H, A145K, A145F, A145W, E146Q, E146H, E146K, E146N, D143N/A145R, A145R/S147T, Q88N/T89S/A145S/E146A/S147D, Q88N/A145I/E146G/S147D, A145H/E146S/S147D, A145H/S147D, L29V/A145D/E146D/S147D, A145N/E146D/S147D, A145T/E146S/S147D, A145Q/E146D/S147D, A145T/E146D/S147D, A145D/E146G/S147D, A145D/S147D, A145K/E146D/S147T, A145R/E146T/S147D, A145R/S147T, E146D/S147D, D143V/F144L/A145S, S95C/G148C, and D143V/A145S, and any combination of the preceding mutations, with reference to SEQ ID NO:2.

23. The construct of claim 20 that comprises a modified Fc, wherein the modified Fc is an IgG Fc that comprises one or more of the following modifications:
a) a modification(s) to introduce knobs-into-holes;
b) a modification(s) to increase or enhance neonatal Fc receptor (FcRn) recycling; and
c) a modification(s) to reduce or eliminate immune effector functions.

24. The construct of claim 23, wherein the Fc is selected from among:
a) an Fc that comprises knobs-into-holes modifications, wherein:
the knob mutation is selected from among one or more of S354C, T366Y, T366W, and T394W by EU numbering; and
the hole mutation is selected from among one or more of Y349C, T366S, L368A, F405A, Y407T, Y407A, and Y407V by EU numbering;
b) an Fc that comprises modifications to increase or enhance FcRn recycling that is/are selected from among one or more of:
T250Q, T250R, M252F, M252W, M252Y, S254T, T256D, T256E, T256Q, V259I, V308F, E380A, M428L, H433K, N434F, N434A, N434W, N434S, N434Y, Y436H, M252Y/T256Q, M252F/T256D, M252Y/S254T/T256E, H433K/N434F/Y436H, N434F/Y436H, T250Q/M428L, T250R/M428L, M428L/N434S, V259I/V308F, V259I/V308F/M428L, E294del/T307P/N434Y, and T256N/A378V/S383N/N434Y, by EU numbering;
c) an Fc that comprises modifications to immune effector functions that are selected from among one or more of complement-dependent cytotoxicity (CDC), antibody-dependent cell-mediated cytotoxicity (ADCC) and antibody-dependent cell-mediated phagocytosis (ADCP);
d) a construct that comprises modification(s) in the Fc to reduce or eliminate immune effector functions, wherein the Fc and modifications are selected from among one or more of:
in IgG1: L235E, L234A/L235A, L234E/L235F/P331S, L234F/L235E/P331S, L234A/L235A/P329G, L234A/L235A/G237A/P238S/H268A/A330S/P331S, G236R/L328R, G237A, E318A, D265A, E233P, N297A, N297Q, N297D, N297G, N297G/D265A, A330L, D270A, P329A, P331A, K322A, V264A, and F241A, by EU numbering; and
in IgG4: L235E, F234A/L235A, S228P/L235E, and S228P/F234A/L235A, by EU numbering;
e) an Fc that is an IgG Fc that comprises one or more of the following modifications:
i) a modification(s) to introduce knobs-into-holes, wherein:
the knob mutation is selected from among one or more of S354C, T366Y, T366W, and T394W by EU numbering; and
the hole mutation is selected from among one or more of Y349C, T366S, L368A, F405A, Y407T, Y407A, and Y407V by EU numbering;
ii) a modification(s) to increase or enhance neonatal Fc receptor (FcRn) recycling, wherein the modification is selected from among one or more of:
T250Q, T250R, M252F, M252W, M252Y, S254T, T256D, T256E, T256Q, V259I, V308F, E380A, M428L, H433K, N434F, N434A, N434W, N434S, N434Y, Y436H, M252Y/T256Q, M252F/T256D, M252Y/S254T/T256E, H433K/N434F/Y436H, N434F/Y436H, T250Q/M428L, T250R/M428L, M428L/N434S, V259I/V308F, V259I/V308F/M428L, E294del/T307P/N434Y, and T256N/A378V/S383N/N434Y, by EU numbering; and
iii) a modification(s) to increase or enhance immune effector functions, wherein:
the immune effector functions are selected from among one or more of CDC, ADCC and ADCP; and
the modification(s) to increase or enhance immune effector functions is selected from among one or more of:
in IgG1: S239D; I332E; S239D/I332E; S239D/A330L/I332E; S298A/E333A/K334A; F243L/R292P/Y300L/V305I/P396L; L235V/F243L/R292P/Y300L/P396L; F243L/R292P/Y300L; L234Y/G236W/S298A in the first heavy chain and S239D/A330L/I332E in the second heavy chain; L234Y/L235Q/G236W/S239M/H268D/D270E/S298A in the first heavy chain and D270E/K326D/A330M/K334E in the second heavy chain; A327Q/P329A; D265A/S267A/H268A/D270A/K326A/S337A; T256A/K290A/S298A/E333A/K334A; G236A; G236A/I332E; G236A/S239D/I332E; G236A/S239D/A330L/I332E; introduction of a biantennary glycan at residue N297; introduction of an afucosylated glycan at residue N297; K326W; K326A; E333A; K326A/E333A; K326W/E333 S; K326M/E333 S; K222W/T223W; K222W/T223W/H224W; D221W/K222W; C220D/D221C; C220D/D221C/K222W/T223W; H268F/S324T; S267E; H268F; S324T; S267E/H268F/S324T; G236A/I332E/S267E/H268F/S324T; E345R; and E345R/E430G/S440Y, by EU numbering; and
f) an Fc that is modified to increase binding to the inhibitory Fcγ receptor (FcγR) FcγRIIb.

25. The construct of claim 24, wherein the modifications that increase binding to FcγRIIb are selected from among one or more of S267E, N297A, L328F, L351S, T366R, L368H, P395K, S267E/L328F and L351S/T366R/L368H/P395K, by EU numbering.

26. The multi-specific TNFR1 antagonist/TNFR2 agonist construct of claim 20, wherein:
a) the TNFR1 antagonist is selected from:
i) an antigen-binding fragment of a human anti-TNFR1 antagonist monoclonal antibody selected from H398 or ATROSAB; or
ii) the domain antibody (dAb) of or comprising any of SEQ ID NOs:52-672, or the scFv of any of SEQ ID NOs:673-678, or the Fab of any of SEQ ID NOs:679-682, or the nanobody of SEQ ID NO: 683 or 684, or the TNF mutein of any of SEQ ID NOs:701-703, or a sequence with at least or at least about 95% sequence identity thereto; or
iii) a dominant-negative tumor necrosis factor (DN-TNF) or TNF mutein comprising a soluble TNF molecule, with one or more amino acid replacements that confer selective inhibition of TNFR1 and are selected from among:
V1M, L29S, L29G, L29Y, R31C, R31E, R31N, R32Y, R32W, C69V, A84S, V85T, S86T, Y87H, Q88N, T89Q, I97T, C101A, A145R, E146R, L29S/R32W, L29S/S86T, R32W/S86T, L29S/R32W/S86T, R31N/R32T, R31E/S86T, R31N/R32T/S86T, I97T/A145R, V1M/R31C/C69V/Y87H/C101A/A145R, and A84S/V85T/S86T/Y87H/Q88N/T89Q, with reference to the sequence of soluble TNF, set forth in SEQ ID NO:2;
b) the linker is a branched chain PEG molecule that is at least or at least about 30 kDa in size; and
c) the TNFR2 agonist is selected from:
i) an antigen-binding fragment that binds to one or more epitopes within human TNFR2 that is selected from among the epitopes set forth in SEQ ID NOs:839-865, 1202 and 1204; or
ii) an antigen-binding fragment of an agonistic human anti-TNFR2 antibody selected from MR2-1 or MAB2261; or
iii) a TNFR2-selective TNF mutein that is a soluble TNF variant comprising one or more TNFR2-selective mutations selected from among K65W, D143Y, D143F, D143N, D143E, D143W, D143V, A145R, A145H, A145K, A145F, A145W, E146Q, E146H, E146K, E146N, D143N/A145R, A145R/S147T, Q88N/T89S/A145S/E146A/S147D, Q88N/A145I/E146G/S147D, A145H/E146S/S147D, A145H/S147D, L29V/A145D/E146D/S147D, A145N/E146D/S147D, A145T/E146S/S147D, A145Q/E146D/S147D, A145T/E146D/S147D, A145D/E146G/S147D, A145D/S147D, A145K/E146D/S147T, A145R/E146T/S147D, A145R/S147T, E146D/S147D, D143V/F144L/A145S, S95C/G148C, and D143V/A145S, with reference to SEQ ID NO:2; or
iv) a single-chain TNFR2-selective TNF mutein trimer, comprising the mutations D143N/A145R, wherein the TNF muteins are linked by (GGGGS)ₙ, where n=1-5, or all or a portion of the stalk region of TNF (SEQ ID NO:812); or
v) a TNFR2-selective agonist comprising the formula:
MD-L1-TNFmut-L2-TNFmut-L3-TNFmut (Formula II); or
TNFmut-L1-TNFmut-L2-TNFmut-L3-MD (Formula III);
whereby MD is a multimerization domain; TNFmut is a TNFR2-selective TNF mutein; and L1, L2 and L3 are linkers that can be the same or different, and wherein:
the MD is selected from EHD2 (SEQ ID NO:808), MHD2 (SEQ ID NO:811), the trimerization domain of chicken tenascin C (TNC) (residues 110-139 of SEQ ID NO:804; SEQ ID NO:805), or the trimerization domain of human TNC (residues 110-139 of SEQ ID NO:806, SEQ ID NO:807);
L1, L2 and L3 each are (GGGGS)ₙ, where n=1-5, or all or a portion of the stalk region of TNF (SEQ ID NO:812), or a mixture thereof; and
the TNF muteins comprise the TNFR2-selective mutations D143N/A145R.

27. A construct that is a growth factor trap (GFT), wherein:
the GFT comprises two different extracellular domains (ECDs) of a ligand, and an activity modifier that is a multimerization domain linked to each ECD;
one or both of the ECD(s) is modified to alter binding of the ECD(s) to its ligand and/or the multimerization domain is modified to have an altered property or activity; and
each multimerization domain is linked to an ECD directly or via a linker.

28. The construct of claim 27, wherein the multimerization domain comprises a modified Fc, wherein the modified Fc is an Fc or IgG Fc and comprises one or more of the following modifications:
a) a modification(s) to introduce knobs-into-holes;
b) a modification(s) to increase or enhance neonatal Fc receptor (FcRn) recycling;
c) a modification(s) to reduce or eliminate immune effector functions; and
d) a modification(s) to increase binding to the inhibitory Fcγ receptor (FcγR) FcγRIIb.

29. The construct of claim 28, wherein the Fc is modified, whereby
a) the Fc comprises knobs-into-holes modifications, wherein:
the knob modification is selected from among one or more of S354C, T366Y, T366W, and T394W, by EU numbering; and
the hole modification is selected from among one or more of Y349C, T366S, L368A, F405A, Y407T, Y407A, and Y407V, by EU numbering; and/or
b) the Fc comprises one or more modifications to increase or enhance FcRn recycling that is/are selected from among one or more of:
T250Q, T250R, M252F, M252W, M252Y, S254T, T256D, T256E, T256Q, V259I, V308F, E380A, M428L, H433K, N434F, N434A, N434W, N434S, N434Y, Y436H, M252Y/T256Q, M252F/T256D, M252Y/S254T/T256E, H433K/N434F/Y436H, N434F/Y436H, T250Q/M428L, T250R/M428L, M428L/N434S, V259I/V308F, V259I/V308F/M428L, E294del/T307P/N434Y, and T256N/A378V/S383N/N434Y, by EU numbering; and/or
c) the Fc comprises modifications to immune effector functions that are selected from among one or more of complement-dependent cytotoxicity (CDC), antibody-dependent cell-mediated cytotoxicity (ADCC) and antibody-dependent cell-mediated phagocytosis (ADCP); and/or
d) the Fc is an IgG1 Fc that is modified to increase binding to the inhibitory Fcγ receptor (FcγR) FcγRIIb.

30. The construct of claim 28, wherein the modifications that increase binding to FcγRIIb are selected from among one or more of S267E, N297A, L328F, L351S, T366R, L368H, P395K, S267E/L328F and L351S/T366R/L368H/P395K, by EU numbering.

31. The construct of claim 27, wherein at least one of the ECDs comprises modifications.

32. The construct of claim 27, where one of the ECDs comprises all or a portion of the extracellular domain (ECD) of a member of the Human Epidermal Growth Factor Receptor (HER) family, and comprises a modified Fc.

33. The construct of claim 32, wherein the construct comprises an ECD that is EGFR/HER1, HER2, HER3 or HER4.

34. The construct of claim 27 that comprises a linker that links one or both ECDs to a multimerization domain.

35. The construct of claim 34, wherein the linker provides flexibility, increases solubility, and/or relieves or reduces steric hindrance or Van der Waals interactions of the construct.

36. The construct of claim 34, wherein the linker comprises a hinge region, or is a linker comprising G and S residues, or is a PEG moiety linker.

37. The construct of claim 34, wherein the linker has the sequence set forth in any of SEQ ID NOs:812-834, or is a PEG moiety linker, or is an IgG1 or an IgG4 Fc.

38. The construct of claim 34, wherein the linker is selected from:
i) a GS linker selected from (GlySer)ₙ, where n=1-10; (GlySer₂); (Gly4Ser)ₙ, where n=1-10; (Gly₃Ser)ₙ, where n=1-5; (SerGly₄)ₙ, where n=1-5; (GlySerSerGly)ₙ, where n=1-5; GSGGSSGG; GSSSGSGSGSSG; GSSSGSGSGSSGG; GGSSGG; GGSSGGSGGSSSG; GSSSGSGSGGSSSGSGSG; GGSSGGSSGGGSSGGSSG; and GSSSGS; and/or
ii) a linker that comprises all or a portion of the hinge sequence of trastuzumab, set forth as residues 219-233 of SEQ ID NO:26; and
iii) a linker that comprises an IgG1 or IgG4 Fc, wherein:
the IgG1 Fc is selected from the IgG1 Fc of human IgG1, set forth in SEQ ID NO:10, or the IgG1 Fc of trastuzumab, set forth in SEQ ID NO:27;
the IgG4 Fc is selected from the IgG4 Fc of human IgG4, set forth in SEQ ID NO:16, or the IgG4 Fc of nivolumab, set forth in SEQ ID NO:30; and
optionally, the Fc includes one or more modifications to introduce knobs-into-holes, and/or increase or enhance neonatal Fc receptor (FcRn) recycling, and/or reduce or eliminate immune effector functions; and/or
iv) a linker that includes all or a portion of the hinge sequence of nivolumab, corresponding to residues 212-223 of SEQ ID NO:29.

39. The construct of claim 38, wherein:
the linker comprises an IgG1 or IgG4 Fc;
the IgG1 Fc is selected from the IgG1 Fc of human IgG1, set forth in SEQ ID NO:10, or the IgG1 Fc of trastuzumab, set forth in SEQ ID NO:27;
the IgG4 Fc is selected from the IgG4 Fc of human IgG4, set forth in SEQ ID NO:16, or the IgG4 Fc of nivolumab, set forth in SEQ ID NO:30; and
optionally, the Fc includes one or more modifications to introduce knobs-into-holes, and/or increase or enhance neonatal Fc receptor (FcRn) recycling, and/or reduce or eliminate immune effector functions.

40. The construct of claim 27 that comprises one or a combination of linkers selected from among:
a) a linker that comprises all or a portion of the hinge sequence of trastuzumab, SCDKTH corresponding to residues 222-227 of SEQ ID NO:26 or up to the full sequence of the hinge region of trastuzumab, that contains or has the sequence EPKSCDKTHTCPPCP (corresponding to residues 219-233 of SEQ ID NO:26), or at least 5, 6, 7, 8, 9, 10, or 11 contiguous residues thereof, or residues ESKYGPPCPPCP, set forth as residues 212-223 of SEQ ID NO:29, or a sequence having at least 98% or 99% sequence identity thereto that is a linker;
b) a linker that comprises the sequence SCDKTH, corresponding to residues 222-227 of SEQ ID NO:26;
c) a linker that comprises a GS linker and all or a portion of the hinge sequence of trastuzumab, corresponding to residues EPKSCDKTHTCPPCP, set forth as residues 219-233 of SEQ ID NO:26;
d) a linker that comprises a GS linker and comprises the sequence SCDKTH, corresponding to residues 217-222 of SEQ ID NO:31;
e) a linker selected from one or more of a linker that:
i) comprises a GS linker and all or a portion of the hinge sequence of nivolumab, corresponding to residues 212-223 of SEQ ID NO:29;
ii) comprises (Gly₄Ser)₃;
iii) comprises (Gly₄Ser)₃ and SCDKTH (residues 217-222 of SEQ ID NO:31);
iv) comprises (Gly₄Ser)₃ and the hinge sequence of trastuzumab, corresponding to residues 219-233 of SEQ ID NO:26; and
v) comprises (Gly₄Ser)₃ and the hinge sequence of nivolumab, corresponding to residues 212-223 of SEQ ID NO:29;
f) a linker that is (GGGGS) and the construct comprises a multimerization domain that is IgG Fc or is the Fc of trastuzumab or the Fc of nivolumab;
g) a GS linker selected from among (GlySer)ₙ, where n=1-10; (GlySer₂); (Gly₄Ser)ₙ, where n=1-10; (Gly₃Ser)ₙ, where n=1-5; (SerGly₄)ₙ, where n=1-5; (GlySerSerGly)ₙ, where n=1-5; GSGGSSGG; GSSSGSGSGSSG; GSSSGSGSGSSGG; GGSSGG; GGSSGGSGGSSSG; GSSSGSGSGGSSSGSGSG; GGSSGGSSGGGSSGGSSG; and GSSSGS; and
a second linker selected from among all or a portion of the hinge sequence of trastuzumab and all or a portion of the hinge sequence of nivolumab.

41. The construct of claim 39 that further comprises a half-life extending moiety that is an IgG Fc, a polyethylene glycol (PEG) molecule, or human serum albumin (HSA).

42. The construct of claim 41, wherein:
the half-life extending moiety is an IgG Fc that is an IgG1 or an IgG4 Fc;
the IgG1 Fc is the Fc of trastuzumab, set forth in SEQ ID NO:27, or the IgG1 Fc is the Fc of human IgG1, set forth in SEQ ID NO:10; and
the IgG4 Fc is the Fc of nivolumab, set forth in SEQ ID NO:30, or the IgG4 Fc is the Fc of human IgG4, set forth in SEQ ID NO:16.

43. The construct of claim 27 that is a bi-specific, heterodimeric construct, selected from among:
a) a construct comprising a first ECD polypeptide and a second ECD polypeptide that each are linked directly or indirectly via the linker to the multimerization domain, wherein:
the first and second ECD polypeptides are different; and
the first and second ECD polypeptides are selected from an ECD that comprises an ECD selected from among:
the ECD of HER1/EGFR, corresponding to residues 1-621 of SEQ ID NO:41, or a portion thereof, or a variant thereof that has at least 95% or 98% sequence identity to SEQ ID NO:41;
the ECD polypeptide comprises the ECD of HER2, corresponding to residues 1-628 of SEQ ID NO:43, or a portion thereof, or a variant thereof that has at least 95% or 98% sequence identity to SEQ ID NO:43;
the ECD polypeptide comprises the ECD of HER3, corresponding to residues 1-621 of SEQ ID NO:45, or a portion thereof, or a variant thereof that has at least 95% or 98% sequence identity to SEQ ID NO:45; and
the ECD polypeptide comprises the ECD of HER4, corresponding to residues 1-625 of SEQ ID NO:47, or a portion thereof, or a variant thereof that has at least 95% or 98% sequence identity to SEQ ID NO:47; and
the portion or variant of each ECD can effect ligand binding, and/or can dimerize with a cell surface receptor; and
b) a construct comprising a first ECD polypeptide and a second ECD polypeptide that each are linked directly or indirectly via the linker to the multimerization domain, wherein:
the first ECD polypeptide comprises the ECD of HER1/EGFR, corresponding to residues 1-621 of SEQ ID NO:41, or a portion thereof, or a variant thereof that has at least 95% or 98% sequence identity to SEQ ID NO:41; and the second ECD polypeptide comprises the ECD of HER2, corresponding to residues 1-628 of SEQ ID NO:43, or a portion thereof, or a variant thereof that has at least 95% or 98% sequence identity to SEQ ID NO:43; or
the second ECD polypeptide comprises the ECD of HER3, corresponding to residues 1-621 of SEQ ID NO:45, or a portion thereof, or a variant thereof that has at least 95% or 98% sequence identity to SEQ ID NO:45; or
the second ECD polypeptide comprises the ECD of HER4, corresponding to residues 1-625 of SEQ ID NO:47, or a portion thereof, or a variant thereof that has at least 95% or 98% sequence identity to SEQ ID NO:47; and
the portion or variant of each ECD retains sufficient affinity for ligand binding, and/or to dimerize with a cell surface receptor.

44. The construct of claim 27 that is a multimer that comprises at least two different ECDs, whereby the construct is at least a heterodimer.

45. The construct of claim 44 that is a heterodimer, comprising the ECD of EGFR and of HER3.

46. The construct of claim 45, comprising the mutations T15S and G564S in the EGFR ECD subdomains I and IV, respectively, with reference to the sequence of the mature EGFR protein as set forth SEQ ID NO:41 or an allelic variant thereof, and Y246A in the HER3 ECD subdomain II, with reference to sequence of the mature HER3 protein as set forth in SEQ ID NO:45 or an allelic variant thereof.

47. The construct of claim 27 that contains:
a) less than the full-length ECD of a HER protein containing at least a sufficient portion of subdomains I and III for ligand binding, and/or contains a sufficient portion of the ECD to dimerize with a cell surface receptor, including a sufficient portion of subdomain II; and/or
b) an ECD that contains subdomains I, II and III and at least module 1 of domain IV; and/or
c) a first ECD that contains all or a portion of the ECD of HER1/EGFR, HER2, HER3 or HER4, a second ECD from a different cell surface receptor (CSR).

48. The construct of claim 47, wherein in c) the second ECD is different from the first and is from a CSR selected from among HER2, HER3, HER4, an insulin growth factor-1 receptor (IGF1-R), a vascular endothelial growth factor receptor (VEGFR), a fibroblast growth factor receptor (FGFR), a TNFR, a platelet-derived growth factor receptor (PDGFR), a hepatocyte growth factor receptor (HGFR), a tyrosine kinase with immunoglobulin-like and EGF-like domains 1, a receptor for advanced glycation end products (RAGE), an Eph receptor, and a T-cell receptor.

49. The construct of claim 45, wherein the first ECD polypeptide comprises the full-length ECD of HER1/EGFR, corresponding to residues 1-621 of SEQ ID NO:41, or a portion thereof, or allelic variant thereof having at least 95% or 98% sequence identity to SEQ ID NO:41 and retaining binding activity and/or dimerization activity.

50. The construct of claim 49, wherein the portion is
residues 1-501 of SEQ ID NO:41, which correspond to subdomains I-III and module 1 of domain IV, or a variant thereof having at least 95% or 98% sequence identity to residues 1-501 of SEQ ID NO:41 and retaining binding and/or dimerization activity.

51. The construct of claim 27, selected from among:
a) a construct comprising a first and second ECD, wherein the second ECD polypeptide comprises the full-length ECD of HER3 corresponding to residues 1-621 of SEQ ID NO:45, or a portion thereof, or a variant thereof having at least 95% or 98% sequence identity to residues 1-501 of SEQ ID NO:45 and retaining binding and/or dimerization activity;
b) a construct of a), wherein the portion has residues 1-500 of SEQ ID NO:45, which correspond to subdomains I-III and module 1 of domain IV, or a variant thereof having at least 95% or 98% sequence identity to residues 1-500 of SEQ ID NO:45 and retaining binding and/or dimerization activity;
c) a construct of b) wherein the ECD portion contains at least a sufficient portion of subdomains I and III to bind to a ligand of the HER receptor, and a sufficient portion of the ECD to dimerize with a cell surface receptor, including a sufficient portion of subdomain II;
d) a construct of c), wherein the first and second ECD polypeptides form a multimer that binds to additional ligands as compared to the first or second chimeric polypeptide alone, or homodimers thereof, and/or dimerizes with more cell surface receptors than the first or second chimeric polypeptide alone, or homodimers thereof;
e) a construct of d) wherein the first and second ECD polypeptides form a heterodimer that binds to HER1 ligands and to HER3 ligands; and
f) a construct wherein at least one of the ECD domains or a portion or variant thereof, includes a modification that alters ligand binding, specificity or other activity or property compared to the unmodified ECD polypeptide.

52. The construct of claim 27, wherein at least one ECD comprises a modification that alters ligand binding, specificity or another activity or property of the ECD or of full-length receptor containing such ECD, compared to the unmodified ECD or full-length receptor, whereby the heteromultimer exhibits the altered activity or property.

53. The construct of claim 52, wherein the property or activity is altered ligand binding and/or specificity and/or dimerization activity.

54. The construct of claim 27 that is a heterodimer containing a HER1 (EGFR) chimeric fusion polypeptide and a HER3 chimeric fusion polypeptide, wherein each chimeric fusion polypeptide comprises the ECD of the receptor linked to the Fc of human IgG1, optionally via a peptide linker.

55. The construct of claim 27, comprising a HER1 ECD and/or a HER3 ECD that is modified to have increased or altered ligand binding and/or biological activity.

56. The construct of claim 55, selected from among:
a) a construct wherein HER1 comprises S418F with reference to the sequence of the mature protein, set forth in SEQ ID NO:41, whereby the HER3 ligand NRG2-β stimulates HER1, and the resulting ECD binds to or interacts with at least two ligands, EGF for HER1, and NRG2-β for HER3;
b) a construct that comprises the ECD HER1 (EGFR), and the mutations T15S and G564S in the EGFR/HER1 ECD subdomains I and IV, respectively, with reference to the sequence of the mature EGFR protein of SEQ ID NO:41, and Y246A in the HER3 ECD subdomain II, with reference to the sequence of the mature HER3 protein of SEQ ID NO:45; and the HER1 ECD comprises additional mutations selected from one or a combination of E330D/G588S, S193N/E330D/G588S, and T43K/S193N/E330D/G588S, with reference to the sequence of precursor HER1 (including the signal peptide) set forth in SEQ ID NO:40, and corresponding to E306D/G564S, S169N/E306D/G564S and T19K/S169N/E306D/G564S, with reference to the sequence of the mature HER1 polypeptide, set forth in SEQ ID NO:41; and
c) a construct that comprises an EGFR (HER1):HER3 heterodimer, mutations T15S and G564S in the EGFR ECD subdomains I and IV, respectively, with reference to the sequence of the mature EGFR protein of SEQ ID NO:41 or of an allelic variant of SEQ ID NO:41 with N516K, and Y246A in the HER3 ECD subdomain II, with reference to sequence of the mature HER3 protein of SEQ ID NO:45.

57. The construct of claim 56, wherein the multimerization domain comprises an Fc that is modified to enhance neonatal Fc receptor (FcRn) recycling, and/or effector functions.
